United States Patent Application Publication US 2025/0320452 A1 - sequence listing, part 10

SEQ ID NO: 7 - DNA, 3977487 bp, synthetic construct (residues 1,988,745-3,977,487 of 3,977,487)
  source 1..3977487: mol_type = other DNA; note = Synthetic E.coli genome
gccgtaatggtctgggtgatttggggcgtgatcgttaatgcctggtttattccagaaattgccagccagttcttcaccatgggtctggtgattggcatcatcggcgttgttttccgccttaacggcatgacggttaataccatggctagttcctttaccgaaggggcgcgaatgatgatcgcccctgccctgctggtgggtttcgccaaagggattttgctgctggtcggtaatggtgaagcgggtgatgccagcgtgttaaataccatcctcaacagcattgccaatgccattagcggtctggacaacgcggtcgcggcctggtttatgttgctcttccaggcggtatttaatttcttcgtgacgtccggttctggtcaggcggcgttaaccatgccgttactggcaccgcttggcgatctggtcggtgttaaccgtcaggttaccgtgctggcgttccagtttggtgatggcttcagtcacatcatttacccaaccagtgcgagcttaatggcaacgctcggtgtgtgcagggtggacttccgtaactggctgaaggtgggcgcgaccctacttggactgctgtttattatgtccagcgtcgtagtgatcggcgctcagttgatgggctaccactaaaaatgttaagagccgcaattgcggctcttttttcattctgccgtttcagtctctacggcttcatttttggcattgcgcttcatccacaacgctagcgctttcaggctgtctggagtgaactcatcgcagcgtgcggtgatttcttccggcgtcagccagcaaacttcactgacttcatcttcctgtagtgcgaagggaccgtgagagacgcagctgaacaatgcgccccagacacggcaatttttatcttcgaaatagaactgcccgtgctcggcaaaggggacaccggcaatgcccaactcttcttccgcttcgcgacgcgcggattccagcagttgctcatcggcctggactacaccgcctgcggtcgcatctaacatgccgggtaaaaagtcttttgtctcggtacgacgctggaccagaattttgcccatgccatcatgcacgacgatgtaagttgcacgatgacgcagacactgtgcccgcatttgttcccggctggcttgtgcaatgacttcgttctcttcattgacaatatccacccattcagtacttgccaaacgacgctgttccattatcaggaaaccttctttttctggcgctcttacggcgcattttgagttgtgggtaaattacggattaatcgcgacctgcgcaatgatactttgatcattgagtgcgattacactaagtacgtcattatccagcatgccataactcgccggattaccgcctttcggaatactcacgctgccggggttgaagtggaaaatctccccccgctgttctgccactggcagatgggtatgaccgtacaccagcacatcgttctggtttaaagcaggcagattttccgggccaaaaagatgaccatgcgtcaaaaacagacgttgtttttccagtaatacctgttgccacggcgcggttatcgggaaatgcagcagcatttgatccacttcgctgtcgcagttgccgcgcacagcgataaccttatgtgccacttcattaagccgttcagcgactttggctggcgcgtaaccctccggtaaagcattacgcgggccgtgattcaacacgtcgccaaggatcaccagccactgggcaccgctttgggcaaacaactccagaacacgttccgtcgccggtaagctcccatgaatgtcgcttgcaaacatcagtttcatcactcactcctcgtcgaaaaaacgtaagctatgatactggattctgtcgttgctatcagccagattgcttcgcgctaagtgcaataaaacgctggacagacgctcgctgccactggaatgttgcataatccaccaggcgttctggcacctcatcgccatgtagtaccaggcggttaatcattagcgccagatcagtatcagcaatgcaccattcaccaaataaattcggctgacccagtactaacaaatgttctgccatcgcgaacagtttctctgcactggcttttccctcggccgttagtggcgcttttttcgcccccgcaaagacaacatccgtcggacgctcttcgcggatgggcatcagatcgctgcgcagccaggcctgaatctgtcgtgcacgcgcacgattttctaaatcaagcggataaatacgttcccaggtcggtgacgcaaatcgatcttccagatactccgcaatggcagaagattcactcaactcaaaatcatcgatttgtaataacggcacacggcgtgtctgaccgtaaccttgccacgtcggctgcaaatgttcaccgctgtcgaggtcgatggtcttgatatgaaagctcaggcctttttcctgcaacgccacccaggcggataacacataaggggagaaaaagtgggcatcactccaaagcgtgatagcgggtttactcattatgtcctcggcaataaagggggctggctatcaaactatagagcctttttgtcactgtcacgtgacgaatactcacgtaagtcgccgcgctttctatacttgtggtgttcagatgattaaacaaccggagctgcaatgatcgatctctatttcgccccgacacccaatggtcacaaaattacgctgtttctcgaagaagcagagctggattatcgcttgattaaggtagacctggggaaaggcggtcagtttcgtccggaatttttgcgcattagccccaacaacaaaattccggcaattgttgatcattctcctgccgatggcggcgaaccgctaagcctctttgagtctggtgccattttgttgtatctggctgagaaaacaggactctttttgagtcatgaaacgcgtgagcgcgccgccacattacagtggttattctggcaggtaggcggactggggccgatgcttgggcaaaatcatcattttaatcacgcagccccccaaaccattccttacgctattgaacgttatcaggttgaaactcagcgtctttaccatgtactgaacaagcggctggaaaacagcccctggctgggaggcgagaactacagcattgcggatattgcctgctggccgtgggttaatgcctggactcgccagcgaattgacctagcaatgtatccggcagtcaagaactggcatgagcggatccgtagccgccctgccaccgggcaggcactgctaaaagcacaactcggtgatgagcgtagcgatagttaacagaaacaggttctcgtgtattatttcatcctaagtaaaacaacggagaacctgcaatggcacaacctgccgctattattcgtataaagaaccttcgtttgcgtacgtttatcggaattaaggaagaagaaattaacaaccgtcaggatattgttatcaatgtgacgatccactaccccgccgataaagcgcgcactagcgaagatatcaacgatgcgctgaattatcgcaccgtaacgaaaaacattattcagcatgtagagaataaccgtttctctttgctggaaaaattaactcaggatgtgctcgatatcgcacgtgaacatcactgggtgacgtatgctgaagtggagatcgataaactgcacgcgctgcgctacgccgatagcgtatccatgaccttaagctggcagcgttaatcgccatatcgggaggctgcatgaacatagtgatcaccggagggacaggattaattggtcgccatttgattccgcgtttgctggagctgggccatcaaattacggtagtgacgcgtaacccgcagaaagccagttccgttctcggccctcgggtgacactatggcaagggcttgccgatcaaagcaacctcaacggcgttgatgcggtaatcaacctggccggagaaccgattgctgataaacgctggactcacgagcaaaaagagcgtctctgccaaagccgctggaatatcacgcaaaaactggtcgatttgattaatgccagcgacacgccaccgagcgtactcatttccggcagcgcaacgggctattatggtgacttaggtgaagtggtggttaccgaagaggaaccgccgcataacgaatttacccataaactctgcgctcgctgggaagaaattgcctgccgggcgcaaagtgacaaaacgcgagtgtgcctgctgcgtaccggtgtagtgctggcaccggatggcggtattctcggtaaaatgctgccgccgtttcgtcttggcctgggcgggccgattggctctggtcggcagtatctggcctggattcatattgatgatatggtcaacggtattctctggctgctggataacgagctgcgcgggccatttaatatggttagcccctacccggtacgcaatgaacaatttgcccatgcgctcggtcatgcgctgcatcgcccggccattttgcgcgtccccgcgaccgccattcgactgttaatgggcgaatctagtgtactggtattaggtggacaacgcgcgctgcctaaacggctggaagaagcgggttttgcgtttcgctggtacgatttagaagaggcgctggcggatgtcgttcgctgatgtggtttacagcaaacatccgccagttaactcccggtgttacaggattagtggctttgcgcgataagatcgtctggactaagtcgggtcaccatcataactaactctctgtctaaacctctatccagcatctcctgagcaatacgcagggcttcttcgtgtttgccctgcattgcgccttcttcacgtaatctgtcagcaatggtcatcagtttctccttttcttgtggtgcgcgttccgctatctcaccaataaatgcacgaaaacgctgggcatcccctgtttgtaatacgtaattaaacagggcttttagctgtctgtcattagtgttccctgtaactagcaggctaacaatttggtcgactaatcccaacagatcgcgctgacgaatatgtttctgaattaactccaacagcgccattttgcggtgttgcataatctcgtcatccggcaccacggtaatatccaccaacggaaaagcgctactatatattttgcgggctatagcaggctcggcaaattcatcaagccagcagagactataaggataaggacttctgcaaccatgataaaacagcatcgggagcaccaatggaagctctttatagcccgcatcaagatggttttgcattgccgcaatggaataacgcatcatgcgaaaagccattaattcttccggcttactttggtgctctatcactacataaatataacccactccctcctgcgttttcacagaccacaagaggtcggaataatattgccgcaggtcttcatcaataaaactgtttggttccagtttaagcgtcgttaaatcacacagtttgcgcagcggcgcgggaagatgaatatcaataaaatcccgcgcggtgtctggatggcgtaaaaaagatttaaataccgcatcatgcggcgtggaagttgtgcttattgtcatggcgttccgtcacccctcaaatttaagatgacgcgacaataaccacgattaacacccaatgcagcaggcagtttttatctttggacagcgaattcagaagtatttttagcggactgtaacttttacatttcagcggaagctgactcgcaaattccccatgaaaatactccggcagcgttagccaccggagaggaaattatttcaggcttcccttaaggaaccgttgcagacgagggctttgcgggttgccaaataactgctccggcgcgccctcttcttctattttcccctgatggaggaaaatgacatgagtagaaacatggcgagcaaagcccatttcgtgagtcactaccaccatggttttcccctcttctgccagttgctgcataatacgcaacacttcgcctaccagttcaggatcgagcgcgctggtaggttcatcaaacagtaaaacttccggttccatcgccagcgcccgcgcgatagaaacacgctgttgctgaccgccggaaagatgcaccggatatttcccctgcgcacgttcgtctatcccgacttttgccagatacttcaccgcccgctcgcgcgcttcctgcttgctcaggcccaacacctgaatcggcgcttccatgacgttttccagcaccgtcatatggctccagagattgaagtgctggaataccatcgtcaggcgtgtgcgcagtaagcgcagttgatttttatcggcgactttgagttgaccgtctttgtcgcgcaccagattgatcgtctggccattgaccacgatgctcccttcactcggtttttcgaggaagttaatgcagcgcagaaaggtacttttcccgcttccgctgcttccgatgatgcttattacatctccggcattcgcttgcagacttacccctttcagcacttcatgttcgccgtagcgtttgtgcaaatcgataacgtttaatttattctcggacatcgtattctcagtgcgtactagaaggtttcacatgctgcaaccagcgtttttccgctctgcgaaagaggctgatcaggacataagagatgattaaatagagcaccgcggcaatgccgaaggcggtaaaaggttgatacgtggcggcgttaatatcgcgggctattttcagcagatccggcaccgtggcagtaaatgccaacgcagtagagtgcagcatcaggatcacttcgttgctgtatgccggtaacgcaatacgcagcgcagaaggcaaaataatgcagcgatacattttaaaagtgctgaagccataggctctggcggcttcaatttccccatgcggaacgctacggattgccccagcaaaaatctcggtagtgtaagcgcaggtgttaagcgtcagcgccagcacggtacagttcaggccactgcggaagaaagcgttaaggaattcggttcccttaacaatctcaagcgtgtacatgccggaatagaacaccagcaactgaacatacagcggcgtaccgcgaaaaatataggtaaataaccagattggaaactggatgtatttattactggagacacgaccaatcgccagaaacagcgccaggactccgcctatcactacgctcaaaataagcagccacagagtgatcgccacaccagtaaagcgataaccgtcggtccacagcagcggtttccagtattcatgtaagatttcgatcacaggtcagccctcttcacacccacggagtagcggcgctcaaggaacagcagcacaccattggaaacagtggtgaaaaccaggtaaatcacgccacagacgatggcgaaatagaacggttcccaggtacttttgcctgccagttgggtggctttgaccacatcttccaggccgagtaagctaaccagtgcggtagatttgaggatcacctgccagttgttgccaatgcctggcagggcgtaacgcatcatgctcggaaacatgatccgccgaaacacttgcccacgagtaaaaccgaacgccgtcgccgcctctatatgtcctttcggcactgccataaaagcaccacggaacgtttcggtaaaataagcaccgtagataaaaccgagagtgataataccagcgaccatcggatcgatatcaatctgcccgacgcccatcgcctccgtcaccgtgtttagcgcaatctgcaaaccgtagaaaatcagcagcatcaacactaagtccggcacgccacgaatcagcgtggtgtacccttcgaaaatcagcccgctaagccgattttggctgagcttaccgccagcgccaattaaaccgatgattacagcgagcactacagagctgatagccagctccagcgtgacgagcgcaccctgtaaaataacaccactaaacccatacaacatgctgcctgtcctgtcgtgtgtggtgaattaccgcctcttgtctccctccggttacccgaagggagcgggctttctttcaccgatggcgattagccaccataaacatcaaaatcgaagtactttttcgctaatttctcgtaagtaccgtcagcgcgcatttcggcaaaggctttgttcagtgcttcgcgcagttcgttatcttctttacgcaggcccatgccggtccctacgccaaacagtttttcatctttaacagacgggccaccgaatttgtaatctttaccgacaggttgtttgaggaaaccttcgctggcagcgacctcatcctggaacgcggcatcaatacgtccggcagtcaggtcagaataaatgttgtcctgcccctgatagctgacgatttcaatgccttttggtgcccaatgttcattaccgaacgtctcctgggtggtgccctgcaatacgcctacccgtttgcctttcaggctctcgactgtcggctgaatgtcagaatttttcgccaccaccaaacgagaatcggcagcgtacagtttgtcggtgaaggctatttcttgctgacgtttttccgtaatggaaaggctactcatgatggcgtcaatcttcttcgcttttaaggacgggattaacgcatccagcggattttcgacaaacgtacattgcgtattgatgcgtttgcataattcctttgccagatcgatatcgaagccaaccagttcgccttgactatttttactttcaaatggcgcataggtcgggtcggtaccgatgcggatgttttgcggaatcgcagcaaacgccgcagttgcgctggagaaggccagaaccagagagaggcttagcaccagttttttcataatgtcctcaactgacagtctttttatagggaatatttacaggtttgttacacttatcgtgccataaaattgaccatcaaggcaaaatatcccgccccgttagacgtattatttttcattaaaaatgcttaagtatgcatttcaatgcaccacgatagtgcaacaaacctggcgtgcaccatgatgatcattccatcaggtacagcttcccagcgacgtatcagtcaccgtagacattaaagtcgaaatactttttcgccatcttgtcgtaggtgccgtcctgacgcagctcgccaagcgccttattgaaggcagccgtcagttcagcatcatctttacgtagccctacaccggtgccatcaccgaagtattttttgtcttttacactactgccagcaaaggcgaaatctttaccagcaggttgcttgaggaatccttcgctggcagcaacttcatcttgtaacgcagcatccagacgtcctgcagccagatcggaatagaccaaatcctggttggcataggccaccacatccacgcctttactacgccaggtctcgttagcgtaagcttcctgggtacttccctgcagcacaccaacatgtttacctttcagactatccagcgttggctgaatcggactacctttggccgcaatcaaacgagaatctgcggcgtacagcttgtcggagaaggcaatctcctgctgacgtttatcggtaatggaaaggctgctaataatagcgtcgatttttttcgctttcagactggggatcagcgcgtcaaagtcactggcaacccaggtacatttcacctgcatccgtttgcacatctcgttaccgagatcgatatcaaagccaacaaaatcacctttagcatctttgctactgaacggtgcgtaggtggtatcggttccgatacgtaccgtctccggtagcgccgcatagctggaagccgctgtggagagaccgactaacaaagacagagcgagaatgctcttcttcatacataaccctcaagtgaaaatggcttttttatgttgtgtattgtgttgtgtgtttgcaggctctttcatgcaggtcttatgccatcttgacgacaacagtaacattcaacgttaaatatgttaataagacgttgcattattgtcctgaagttgaagatagcaggtatagcggttgaatcgcagcgtttcgattgaatggcagaaacaaaatgtcgaggatttgatcgcggttgcaaaattgccctgaaacagggcaacagcggagttatgcgccctgccagcgggcaaagagatcttcaggaagggttatcgcaaactggtcaagaacacgattaaccgtctgatttatcacatcatcaagggattgcgggcgatgataaaacgccggaacgggaggcataatcaccgcaccgatttctgccgcctgagtcattaaacgcagatggcctaagtgcaatggtgtttcacgcacgcagagcaccaacgggcgacgctctttcagcaccacatctgccgcacgggtcagtaagccatcagtatagctatggacaatgccggaaagggttttgatactacagggtaaaatcaccatccccagcgtctggaaagaaccggaagagatgctggcggcaatatcgcgcgcatcgtgcgtgacatcggctaatgcctgcacttcgcgcagagaaaaatccgtttcgagggataaggtctggcgcgctgcctggctcatcaccagatgcgtttcgatatctgtgacatcgcgcagaacctgtaataagcgcacgccataaatcgcgccgctggcaccgctgatgcctacaatgagtcgtttcataaatagttgccctgtcagacttgcaggcagactttgcaggatttcggcgggagttgcaagtcagggtgccagaccggcaccctcagcgaaggcatcatccttcgttatgcatttcgagattttccacttcgttctgacgttgcactgctttggcgtcatcattacgtaacgtatcgaggaaatcgaggtagccctgatcaacatctttggtgacgtagacgccgttgaacacgctgcattcaaactgctggatatccggattttcagcgcgaacggcgtcgatcagatcgttcagatcctggaaaatcaacccgtcagcaccgatgatctggcgaatttcatcaacttcgcgaccgtgagcgatcagttccgtggcgctcggcatatcaataccataaacgttcgggaagcgaatttccggtgccgcagaagcgaggtacactttcttcgctccggcttcgcgtgccatctcgataatctgctcagaagtggtgccacggacgatggagtcgtcgaccagcaggacgtttttatcgcggaactcggcgcggttggcattcagtttacggcgcacggacttacgacgcagctgctggcccggcatgataaaggtgcggccaacatagcggtttttaacgaagccctggcggtacggtttgcccagaatacgagcaatttccagcgcgatatcacagctggtttctgggatcgggatcaccacgtcgatatccagatcttcccattcgcgggcaattttctcgcccagtttcgtgcccatattcacacgcgcgctgtaaacggaaattttgtcgataaagctgtccgggcgggcaaagtatacatactcaaacaggcacggattgctgaccggattgtcagcacattgacgggtaaacaactgcccttcttcagtgatgtaaatcgcttcgcccggcgcgacgtcacgcaggaaatcaaagcccagcgtatcgagcgctacgctttcggaagcgaccatatattctgtacggttctcgtcaatatcacgttttcccagtaccagcggacgaatcccgtttggatcgcggaaagcaaccataccgtggccgataatcatcgccacacaggcatacgcgccgcggattaagcggtttgtggcagcaatggcagcgaaaatattgtcggcttccagcgggtagtggcggaagttgtccagctcgctggcgaagatattaagcagaatttcgctgtcggaagtggtgttgatgtggcggcgtttttcttcaaacagttttttacgcaactcgtgagcgttggtcagattgccgttgtgggcaagcgtaatgccatacggggagttaacgtaaaacggctgcgcttcagaggcgctggagctgccagccgtggggtaacgcacatgaccaatgcccatattgccctgcaaacgctgcatatggcgagcttcaaatacatcgctcaccagcccgttcgctttacgcaaacggaagcagttattggcatctatggtgatgatgccggcggcatcctgaccgcgatgctgaagcaccgttaaggcatcataaatgctctggttaaccggcataacaccggcgataccgacaataccgcacatacgtctttttcctcgttaagccacatctcagagcacttacgctctgggcaagaaactactgctgctttgcagataatcaaaaaaacatctgatgataaaactgaattgcgggatcagctgacttttgctccagtcttcgcttttgctcaccccggtaaaggagtcgagaaagaagagaatggcagcaacaatcaacacaccgcgcaacgcaccgaaacagacgcccagcacccgatcggtgccactcaaccccgttttctccaccaactggcctatcacgaagttcacgatagcaccaacgatcagggtagcgataaacagtaccgcgatggcaatcccatttcgaaccagttcgtcttcaaagcccgtaaaccagacactcaggtaagtgtagtaatgactggcaacaaagaaagcacaaccccatgtcaccaggcttaacgcttcacgaacaaagccgcggatcaggctaaccagagaggaaaaagcaatcaccgcgattatggcgtaatcaatccagaccatatgtgtcccacgattttacgccctgtcatcctgttcggggcgcattctaacagaaaaagaaaacgtttgcgtagggatttccttcccgcgcatcaataaaaatggcgctgaaaaaatattcaacgccatcgactttttatgcctttgcggcatcgggcaatgcgtgtcggatgcggcgtaaacgccttatccgacctacggttctacccctgcgtaggcctgataagacgcgccagcgtcgcatcaggcaagaccgtattaattcggcgtatagcccattaccacgccacttaagccagaaagttgcttcaactcacccaggctacctttcagcttatctttgctggcatccggcccaaccagaatacgggtaattttaccctgcactggcgtggatgggctcgtataaacccgataaccggcaccgcgcagcttaccgacaatctcattcactttatcggcatttttcagcgcacccagttgcacaacataggctttacccgtcggtgcagctttttcttccacgaccggcttcggttctggcttcggcgcaggtggtgcttcaacctttggtttaggcggctccaccggtttcggcttcggtggggcgaccggtgcaggttccggttcaaactcggtgttattggctgcaatagtggccggatcgaggctcggtgctgcggcatcacctgcccgcacctcttccgctgcgccttccggcggctgcgtcggtaacgcctgggtggcggctggcatcatatcaggctcatcacgatcgcccgctttcggcaccagcgggatagccgcgaactcatcctgataatgttttttctgcccgtccagcagccctggaagtacaatcacccccagcgccaccagcacgatcgtgcccactaaccgattctgaaacttacttgccaccgcttctcctcgcgtcaatcacttccatgacatgtgcgaccgtgtggaaagaaccacacaccagcacggtgtcttccgctttagcgtccgccattgcggcatcccatgcctgcgcaacgctatcaaaacttttgccgttacccaaatgctcaagcagttgttctgccgtggcaccgcgcggcccttccagtggcgcacaataccagtcatcaaccacgcttttcaaccaggccagagttccggcaatatctttatcatgtagcataccgataaccgccagcacgcgcccgtttttcggtagcgctttcatacgcccggtgagatattccgccgcatgtggattatgcgcgacatcaaaaataacgcgtgggctctcgctcacaatctggaaacgtcccggcaaaattgcgctggcaatcccgtcgcgaatggcattttcactgacttccagcccgctggcacgcagtgccgccagcgctgttgcggcattcggttgcgggacaagcggcaacggcagattttccagcgtgccgtgagcatcgctaaacgcccagtcatgatcggtgacggaatagttccactcaacgccccgacgttgtaacagtgcacctttttcctgcgccacatcagcaatggtagaaggcatttccggctcaccgacaattgccggtttttcgctgcggaagatgcctgctttctcgcgaccaatactttcgcgatctggacccagccagtcggtatgatccagcgcaatactggttactaccgcgacatcggcgtcgacaatattggttgcgtccagacgaccgcccagccctacttccagaatcaccacgtcaagttgtgcctgcttgaacagccacaacgcgctcagcgtaccgtactcgaaataggtcagggaaatatcaccgcgtgcgctttcaatctccgcaaaagaggcggtgtgggcgctttccggcaattcctggccctgcacacgtacgcgctcggtataacgcaccagatgagggctactgtagacgcccactttgtaccctgccgccatcagaatgctctccagcgtacggcaggtggtgcctttgccattcgtacccgcaacggtaaacacaaatggcgctggtttcaggacgccaagacgcgccgcgaccaggctcacgcgctcaaggccgagatcgatagttttactgtgcaggttttccagataagaaagccagctagccagagggctcgcggcttgaggagtgcgtttgataatcatggtatccgctgattcgttacggtgagaatagcaaaagggcagagccagtggccctgcccttatcagttatcaggcctcaggttcctgatccggtaccgggggtaccactacgccttcacgcggcgcttcaggattcggcgctggcagattcatcaacttcgccagaatgctcgccagtttcaggcgcatttccggacgacggacgatcatgtcgatcgcgcctttctcgatcaggaattcactgcgctggaatccaggcggcagtttttcgcgaacggtctgttcgataacacgcggaccggcaaagccgattaacgctttcggttcagcgatgttgagatcgcccagcatggcgaaacttgcagaaacaccgcccatcgtcgggtcggtcagcacggagatgtacggcaagccgcgctcctgcatttttgccagtgccgcagaggttttcgccatctgcatcaggctcatcagtgcttcctgcatacgtgcgccaccagaggcggagaagcagatcagcgggcagttatcttccagcgcctgctcaacggcacgcacgaaacgtgcacccacaacagaccccatactaccgcccataaaggcgaactcgaatgccgcagcgacaaccggcattccatacagagtgcctttcatcaccaccagcgcatctttttcgccggtttctttctgcgcagatgccagacggtctttatacttcttggagtcacgaaacttcagcacatctttcggctcaagctcgctacccagctccacaaggcttccttcatctaacaggctatgcaggcgattacgcgctgtcatacgcatgtgatggtcacacttcggacagacctcaagattacgttccagctcagcgcggtataaaacctgaccgcagctatcacacttagtccacaccccttcaggaatgctcgccttgcgggtgggagtaatgttgcttttaattcgttcaatccagctcattagggacctttctgtctgaacctggttcgatgccagttttatctttggggacgcataatgccatttttgcccccaacagaccatgaatgttgcacattaaaacataacagcccgaaactttggataaaaaagtggtcgaaccgcggagttactttttattttgcggcgcgtgccgcagcgcgtttgtgacggattatttcgatgacgcccggcaaaatagaaaccacaataatcccgacgatcagcagcttaaggttatcctgaaccatcgggattgtaccgaagaaatagcctgcgtaggtaaaaagcagtacccacaacagtgcgccgatcacgttataagcggcgaaatgacggtagctcatgtggcccattcccgcaacaaacggggcgaacgttctgacgatcggcacaaaacgggcgagaataatcgttttgccgccatgtttctcataaaactgatgggttttgtcgagataactgcgacggaaaattttgctattgggattactgaacaacttttcaccgaacaaccgcccgatagtgtaattgaccgcgtcacccacaatcgcggcgatcagcatcagcaccaccatcatatggacgttgagatcgttggtttccagacttgccaacgctccggcaacaaacagcaaactatcacccggtaaaaacggcgttaccaccagaccggtttcacagaacaaaattaagaacaaaatggcataaacccagacgccgtactccgcgaccagctctgccagatgcacgtcaatgtgcaggataaaatcgatgaggaaataaatcaggtccatatttgcctatgccttgtactcgtcatctttcaggctgtaactacgttggctacagcctgaaatgttccgagcattattctcgttagtccgccagaaatagcgggcccattggcggttttggaagatcataccggtcagggtaatccaccgcgaccagatacagcccttccgcttttgccgttgctgccgccagcgttctgtcctttgccgccagcaactctgctatccagctctccggctggttgtgggcaccgacttccatcaggctgccgacaatattcctgaccatatgatgtacaaaagcattcgctttaatatctaccaccacataaggaccgtgacgcgtgacattaatatgcataacgttgcgccacggggttcgggactggcactgcaccgcacggaagctggtgaaatcattctcgcccagcaagcattgcgcagcccgatgcatccgttcagcgtccagcggttcgtaaaaatgggttacccctttactcagtaccgccgggcgcagccgatgattgtagatgatgtagcgataacggcgagccgtggcgctaaatcgggcatgaaaatcatcaggtacagttttaacccaacgcacagcgatgtcaccaggtaaattcgcatttacgcccaaggtccacgccgcgtctttgcgcagcgcggttgtttcgaaatgcacaacctgcccggtaccgtgtacccctgcgtcagtacgcccggcgcagaagacggtgatgggttcgttcgccacctgggagagcgccttttccagcttctcctgcacactgcggacttcgttctgccgttgccagccgtaatacttactgccgtcgtactcaatgcccagcgcaattttataaactggcggttgttgctggtcggacattagtacagatactcctgcaccagtttctcggcgatttttactgccatcagcgcgccgccaaagcgaacgttatcggccacgctccagaactggacttgctccggcataccgtagtcattacgcacgcagccaacagaaagatgcggcgtaccgctagcatcacctacctgagttgggaattcgttctcttcagagagcacaatatcttcgccttgaacaaacgcatcacgcgcttcttctgctgccagtggacgcagagcttcaaagttgaccatctgggcatgaccgtagaataccggtgcctggacgacgctagcgctaatcatcagcccttcgtcctgcaggattttgcgtacttcgtcaacgatacgacgttcttcacgcacgctaccttcgctatccggcagtaacggcagcatgttgaacgccagctgacgcccgaagaaatcttcttcgtcaatcggaatgccgttgagcaatttcgcactctgccccgctaacgcatcgaccgcttttttgccctgggcggaggcactaatcaggctggtaacgctgatacgacttaaaccgccctgatcgattaacggtttcagtgccgccagcagctggctggtcagactgtctggtacggcgatgacattccggttccggtaatctgtcagtacaaacgggtttacttccggcaccaccagcggtacgtcgggttcgagagcaaacaatccactgctgtcgatcaccaggcaaccactgttggtcgcttcttcaacccaggcagcggtagcttctttgcctgcgacaaaaaatgccagctgcgcctgcgtccagtcgaattcagcggcatcctgcacggtgattgtcttaccaccaaagcgcagttgttcgcctgcgctttcgttacgtgccagtgcataaatttccccaaccgggaactgacgttcagccagcgtttcaagcagggcttcgcccacagcgccagttgcgcccaggacggcaatgttccagccttcagacatggtggtttactccagaaatagcaaagctccctgccaatgttacagcagagagcatgaagaagagattaacgtgccggatgatgaacggcgttaaaacccagtttacacagcaaacttgccgcactggcgtcatcacaaattacatacagagaactccattcacggcgctcaagatagtttttgcgcagtttatcgaactcacccggtatcccggcgactttacgcagcggtgcgtcatcgcggcgcacatcatacaccaaatgcaccagccttttcagcgtcggttgatcgagcgggccatgcagcgtaatgcgaccaaactctggcgcaggcagtaatgtatccagcgcaacgtgctgttcatgcccaataaacttgctataagcttcaaacacttgcgtagtaccgcgtgctttaccttccagggtatagcctgcgatatggctcgtgccgatatccacttttttcagcagctcgacgttgagttccggttcgccttcccagacatccagcactacgcttaacttctggccttcattcaggcaggtcagcaacgcagtattatcgacgactgcgccacggcaggcgttaatcagaatcgctccgggcttcaggctacggatcagtttttcatccgccagatgtagcgttttgtacggaccatctttaaagagtggcgtatggaaagtcagaatatccgcgcgctggactaactcatccaggctgcggaaatcaccctcatccccacggtcggcgcgaggcggatcgcaaagtaaggttttaatccctaacgcttccagtcgcgcctgcaatcgacgtccaacgttaccaacgcccacgatccccaccgtacggtcgtacagactaaatccatcgcgttcggcaagcatcagcagggaggagaaaacatattccaccaccgcaatcgcattacagccaggtgcagcggaaaaaccaattcccgcctgcttcaaccatgcttcatcgacatggtcggtccccgcagtggcagtgccaacaaatttaatgggttttcctgccagcaaagattcattcactttcgtgacgctacgcaccatcagcgcatccgcgtctgccagttgagcgacggggattggacgcccgggaaccgcggtcacctcacccaaacggctaaataagtcgcgggcataaggcatattttcatcaacaaggattttcacgtttgtgttacctgtatgagacgagagttaaccggacaagtgtgccataatctcgcggccaggcatacttgcgaagatttcaggtataaggatacgtaatgatacaacctatttccggccctcctcctgggcaaccaccaggtcagggagataatctgccgtctggcacgggcaatcagcctttatccagtcagcaacgtactagcctggaaagcttaatgacgaaagtgaccagtctgacgcaacagcaaagagcagaactgtgggcgggtatcaggcacgatattggtctgagcggagatagtccgctgcttagccgtcacttccctgccgctgagcataatctggcgcaacgtctgctggccgcgcaaaaaagccattctgcccgccagcttttagcgcaattaggggagtatttacgtctggggaataatcgtcaggcggtcacggattatatccgtcataactttggtcagacgccgctgaatcagctcagtccggagcaattaaaaaccattctcaccctgttgcaggaagggaagatggttattccgcaaccacagcagcgcgaggcgaccgaccgtcctttattaccggcggagcacaatgcgctaaaacagctggtgaccaaacttgcggcggcaacgggggaacccagcaaacagatctggcaaagcatgctggaactttccggggtgaaagatggcgagttaattccagcgaaactgtttaaccatctggtgacctggctacaggcgcgtcagacgctaagccagcaaaatacgccgacgctggaaagtctacagatgacgctaaaacaacctttagatgccagtgaactggcggcgttaagcgcatatatccagcaaaaatatggtctttctgcgcaaagtagcctttcttctgcccaggccgaggatattcttaatcagctttatcaacggcgggttaaagggattgatccgcgtgttatgcaaccgctgcttaatccttttccaccgatgatggacacgttgcaaaatatggcaacgcgtcccgcgctgtggatactgttagtcgcgattatcctgatgctggtctggctggttcgttaaccccgacgaaaactcagtatcgtgacaataatacccagcaccgcagagatcgccccggcaagaaatacgctagagtaaccaaacgtggtcgccagcattcccgccagcggcccggagacgccgagggcgatatcctgaaacgcggcgtaaccgcccagtgcggtgccgcgaacttgactggggacgcgtttaaccacctccacgcccagcgcaggaaagataaggctacatccggctccggttaacgccgcgcccgctaatgcgacccatgcacctggggcttgccagagcagcaacaagcccaccgtttctacaagcagagagacaatcgccactttcacgccgccaaaacggtccggcatccagccaaacatgacgcgcatcacgacaaatgcgccgccaaacgcggtaagagtaaagcccgccatcgcccatcctttgctggcaaagtagaggctaacgaaagtcccgataacagcaaaaccaacgccttgtagtgccagacctaaccctggtttccagataagcccgacaacgctccacaggcttggacgttctcccgccagggccggtactttgcgcactgtgccgttacaggcccacgccagtacgggtaataccattgtggtgatcgccagtgcggcaaaaccgtaatggctatgaatcaacaggccaagcggagcaccaacagcgagggcaccgtaaatcgccattccgttccaactcatcactttgccagagtgttttggccctacgatgcctagtccccaggtcagagcgcctgtcagtaactggctttcaccaaagccaagaatcaaacgcccgacgaccaacagagcaaatttgaacggtgcggagacaggcaaaatcgccgccagcagcaacgcgccgccagccagaccacaagctaacattccctgaagcgcgctacgttttgcaccatattgatcggccagtcgcccggcgtaaccacgcgtcagcaccgtagccagaaactgaatcccgacggcaatgccgaccatggtattgccatagcccagttcatgatgaacaaacagcgggataaccggcaacggcaaccctacggtcatgtaggtgagaaaaaccgcaaaagcgatgcggaagaggctaaaattggcagaagatcgtgtttcggtttggcttacagcagtcatgcattactccagaatgcagcgcaaggcgaggagtatccccgtctcatctctctggtttcagggttacggtgcgttggcaggatttaacgcgtacgtcttttcagaaggaaatcgacaaagcgggaagtttgcctggaactggcggcgattgtcaatgatgtgaaaaagggaaccatcaggttcccttttgcgttagtgccggaggccgcattggcgcgtaacgtcggatgcgacgctggcgcgtctactccgacctactgcgaattaatctttcagcttgcgcattaccagcgtggcgttggtgccgccgaagccgaagctgttagacataacggtggtcagttcgcgatcggtcgtttcggtcacgatgttcagacccgcagcctgctcgtccagctcttcaatgttgatgctcggggcgataaagccgtgttccagcatcagcagagagtagatagcttcctgtacgccagcagcgcccagagagtgaccggtcatggctttggttgcagaaatcgccgggctcttatcgccgaacacttcacggatagctgccagctctttcacgtcgccaaccggagtgctagtaccgtgggagttcaggtaatcgattggggtatcaacgccatgcatcgccatcttcatgcagcgtactgcgccttcgccagacggagcaaccatgtctgcaccatcagaggttgcgccgtagccaacgatttcagcatagatgtgagcaccacgcgccagcgcgtgttccagctcttcaaccactaccataccgccgccgccagcgataacgaaaccgtcacggtgagcgtcgtaagtacgggaggctttttccggggtgtcgttgtatttagtagacagcgcacccattgcgtcgaattcgcaagccatttcccagcacagctcttcgccgccgccagcaaacacgatgtcctgtttgcccagttggatctgctctactgcgttaccgatacagtgtgcggaagtcgcacacgcggagctgatggagtagttaacgccatgaattttaaacggggtggcgaggcaggcagaaacgccggatgccatcgctttggtgaccacatacgggccaaccgctttcaggccgcgcgggccgcgcattgcgtcagcgccgaacacctggaaacgcggggagccgccgccggaacctgcaatcaggccaacgcgcgggttattctggtaagcttccggagagaggcccgcatcagcgattgcctgctccatagaaaggaatgcataaatggatgcgtcgctcataaagcgcacaactttgcggtcaatgaggccagtggtatccagttttacgttgccccagacgtggctacgcatgccggaatccttcagctcctgagagaaagtgatcccactacgtccttcacgcagagatgccaggacttcctgctggttattaccgatgctggaaacaatgcccaggccagtaatcactgcacgtttcattcaatacctctgtaagtcgcacatagagtaagtttcgaatgcacaatagcgtacacttgtacgccgaacaagtccgatcagccatttaatagagaaatttgcgcagccttacacacatcgctaagatcgagccaccgcctgtaagacgagtaacttacgtgaaacactactccatacaacctgccaacctcgaatttaatgctgagggtacacctgtttcccgagattttgacgatgtctatttttccaacgataacgggctggaagagacgcgttatgtttttctgggaggcaaccaattagaggtacgctttcctgagcatccacatcctctgtttgtggtagcagagagcggcttcggcaccggattaaacttcctgacgctatggcaggcatttgatcagtttcgcgaagcgcatccgcaagcgcaattacaacgcttacatttcattagttttgagaaatttcccctcacccgtgcggatttagccttagcgcatcaacactggccggaactggctccgtgggcagaacaacttcaggcgcagtggccaatgcccttgcccggttgccatcgtttattgctcgatgaaggccgcgtgacgctggatttatggtttggcgatattaacgaactgaccagccaactggacgatagcctaaatcaaaaagtagatgcctggtttctggacggctttgcgccagcgaaaaacccggatatgtggacgcaaaatctgtttaacgccatggcaaggttggcgcgtccgggcggcacgctggcgacatttacgtctgccggttttgtccgccgcggtttgcaggacgccggattcacgatgcaaaaacgtaagggctttgggcgcaaacgggaaatgctttgcggggtgatggaacagacattaccgctcccctgctccgcgccgtggtttaaccgcacgggcagcagcaaacgggaagcggcgattatcggcggtggtattgccagcgcgttgttgagcctggcgctattacggcgcggctggcaggtaacgctttattgcgcggatgaggcccccgcactgggtgcttccggcaatcgccagggggcgctgtatccgttattaagcaaacacgatgaggcgctaaaccgctttttctctaatgcgtttacttttgctcgtcggttttacgaccaattacccgttaaatttgatcatgactggtgcggcgtcacgcagttaggctgggatgagaaaagccagcataaaatcgcacagatgttgagtatggatttacccgcagaactggctgtagccgttgaggcaaatgcggttgaacaaattacgggcgttgcgacaaattgcagcggcattacttatccgcaaggtggttggctgtgcccagcagaactgacccgtaatgtgctggaactggcgcaacagcagggtttgcagatttattatcaatatcagttacagaatttatcccgtaaggatgactgttggttgttgaattttgcaggagatcagcaagcaacacacagcgtagtggtactggcgaacgggcatcaaatcagccgattcagccaaacgagcactctcccggtgtatagcgttgccgggcaggtcagccatattccgacaacgccggaattggcagagctgaagcaggtgctgtgctatgacggttatctcacgccacaaaatccggcgaatcaacatcattgtattggtgccagttatcatcgcggcagcgaagatacggcgtacagtgaggacgatcagcagcagaatcgccagcggttgattgattgtttcccgcaggcacagtgggcaaaagaggttgatgtcagtgataaagaggcgcgctgcggtgtgcgttgtgccacccgcgatcatctgccaatggtaggcaatgttcccgattatgaggcaacactcgtggaatatgcgagcttggcggagcagaaagatgaggcggtaagcgcgccggtttttgacgatctctttatgtttgcggctttaggttctcgcggtttgtgttctgccccgctgtgtgccgagattctggcggcgcagatgagcgacgaaccgattccgatggatgccagtacgctggcggcgttaaacccgaatcggttatgggtgcggaaattgttgaagggtaaagcggttaaggcggggtaatctgctctcgcagtgtttgccggatgcggcgtgaacgccttatccgacctacgtgtgacgtgtaggcctgataagacgcgataagcgtcgcatcaggcatgctgctccagacgccgcaacttactgctgactcgcctgctgaaacaggttttcccacatatcggtcaccagcgcctggtcacgcgggctcaattcaccagcaccaatggctttttccagactctggctaacggtcgtatgcaccgcctgagcggagtggtcatcaccactttccagttctgcgatggctaatgtcaggtggccacgcaaatacccactggcaaacaactcatcatcactggcatggtcaaccataccgtcgattaatgccagaatgcgactttcaaactccgcgatcatcttctttcctcattgtaaaacgtggcgctggcttcagttgagcgcttccggccacgggaactgttccgccgtaagttccggcgtgtgataataattttgtagtgctttaatgaagcgtgccggacgttccggaatgccatttgtcagataatccatcacctgcgcatgtactcgccgttgaaacaccacacgatccggttcgaaatccccttccagattgtcgcaactgacgttaaacggatatcccgccgccacacagaacaaccagtcgagcgcctgcggcttcacttcaacatcttcaaactggctttgcgtttgggcatcgcgtccgtccgggcaataccagtagccgaaatcaaccagctcacggcgcgctttcccggcaatacaccagtggctaatctcatgaattgcgctggcataaaagccatgagcaaagacgattcggttatacggtacttccgcatcagcaggaagatagatcggttcgtcgtcgcctttaatcagacgggtattaaaatcatcggcaaagcagctattaaaaatttcaatcaactgctcgtagtggtgtgtactgttcattagttcatccccaaccagtggaggatctcctgtccgtggctgtcgtaaagtaatttggcactcatcaccgcgctgacgataacaatcatcgggcggatcagcttttgtcctttgctcaacaccagtcgactacccatgcgcgcgccgaggaactgccccaccagcatgacaaagcccgtcgcccaaatcactttgccgccgagaataaacagcagtaaaccgccgatgttactcgttgcgttgagtaatttggcgtgagccgtggctttggcgaggttaaatccgcacagcgtaacgaaggccagcgcgtaaaagctcccggcagccgggccaaagaatccatcataaaaaccgacgcagccaccggctattaacgcgaagggtaaaccgtacatccggcgctggcggtcttcttcacctagctttggcatcagcaagaaatagaggccgatacaaattaccagaatgggcaaaatctgccgtaagacatcagcctgaacgtattgcaccagcagtgcgccgctcatactgccgacaaaggtcatggcgatattgagtttctgatcgcttaaactaaccactttgcggcgaataaagtagatagtagcggaaatagagccgccgcaggcttgcagtttattggttgccagcgcattagcgggagacatccccgctgccatcaatgccggaatggtgagtaacccaccgccaccggcaatgctgtcgataaatcccgccagcatggcgacaaaaaagagaactcccagcaacagcggggaaaccataaacaggctattaaacgtttccattagatcacgtgctcatccagtagcgcctggcaggaaggcggcaacggaggcggtgtcttcttctcaggctttgttgttcccggttttggaggttcaaaccagctttgcagttctgccccgcaaccatcgccacttggcggtaaaggttgatcttcacactccagactatcggcagggcaacgtaatcgtacatgcatatgcgcgcgatgctggaaccagggtcgcactttgcgcaaccagtcgcgatcggtgcccgcatcaaggcaaagttgttgtttaatcgccggattaacaaaaatgcgcgtgacgtctttgtcctgggcggcgagtttgatcaagctgaaaatttctggcttccacagcgtggagacaacgtgtttaccgtcgcgggaaactaagtccagtgcttgcgggcgcaagagctgcgcggaggtccagcgagttttcggcagttgcagaaagatatcgacatccagtccggtctggtggctggcatgaccgccgttgaaacgcccaccagcgggcatccccatatcgccaatcagcaccgtacccatgcccagattgctcacctggctactcagacgctggataaacatcaccagatccgggtgaccgaaatagcgacgctgatcggtacgcatgacctgataatgttcggactgtatcggcagcgtgtcagcgccgacaatacagccattagaaaaactgcctatgctttgtgcgctacccggcacaggttgggttattttttgccacggcgtcgctgccaggctggcgctactggcaagcagagccagcagcgcaatcgcggttttattcattttttaccagcgtggaatatcagtcttcacatcggcattttgcgcccgttgccgtaacaggtgatccattaaaacgatcgccagcatcgcttctgcgatcggcactgcgcggatcccgacacagggatcgtgacggcctttggtgatcatctcaacttcttcgccaaagcggttaatggtacgacccggcacggtaatgctggaggtcggtttcagcgccatatgggcaatgatttgctgcccgctgctgataccgccgagaatgccgcccgcatggttgctctggaaaccgtctttggtgatttcatcgcggttctggctgccgcgcagcgccaccacgtcaaagccgtcgccaatttccacgcctttcaccgcgttgatgctcatcagcgcatgggcgatgtcagcatccaggcggtcaaagaccggctcgccaagtccggcaggaacgccactggcaacaacggtgactttagcgccgatggagtcgccctcttttttcagcgcacgcatcaactcgtctaacgcgtcgattttgtcggggtccgggcaaaaaaacggattttgctcgacctggctccagtctttgatatccagcggaatgtcgcccatctgggtcaggcagccacggatttcaataccaaatttctcggcgagatattttttggcaatagctcctgccgccacgcgcatggcggtttcgcgggcggaagaacgtccaccgccgcgataatcgcgcagaccgtatttttgttcgtaggtgtaatcggcatggcctggacggaaaacgtccttaatcgcactgtaatcctgagagcgctggtcagtgttttcgatcaacaagccaatgctggtgccggtagtaacgccttcaaaaacaccggagagaattttgacctgatccggctcgcggcgctgggtggtatagcggcttgtcccagggcgacgacggtcgaggtcatgttgcaggtccgcttccgtcagcggaatgcctggcggaacaccatcgacgatgcagccgagcgccagcccgtggctttcgccgaaggtggttacgcgaaagagttgtccaattgtgtttccagccatcacggctccgttattgttgtgtttgcgtgtttacttaatctttataaatcgcgaaatgttctcgtgcggcaataagctgctctttggtgagcataaacacaccatcgccgccgttatcaaactccagccaggtgaacggaacatccggatattgttccataagatgtaccatgctgttgccgacttcacaaatcaacacgccatcatcagcaaggtaatctgccgcgttaccgagaatgcgacgcgtcagtttcaggccgtcagtgccagatgccaggcccagttccggctcgtggcggtattcgtttggcaggtcggacatatcttccgcatcgacatacggcgggttagtgacaatcaggtcgtactgcactttcggcaagtcgcggaacagatcggaacgaatcggaatgacgttgtggatcagaccgtgttcttcgatgttctgttcagcaaccgccagcgcgtctggagagatatccaccgcgtcgacttctgcatccgggaaggcataagcacaggcaatggcgatgcagccgctaccagtacacatatctaaaatatgctgcggttgcttgctgataagtccggcaaatttattgttgatcagttcaccaatcgggctgcgcggcaccagcacgcgttcatcgacgtaaaattcatggccgcagaaccacgctttgttggtcaggtaagccaccggaatgcgttcattgacgcggcggatcacgcgttcaacaatacggtgtttttcgctggaggtcagacgcgcggtgcgcatatcttccggaatatccagcggcaggtagaggctaggcaacaccagctgtacggcttcatcccacgggttatcggtaccgtgaccgtaccagatatttgccgcgctgaagcggctcacgctccagcgcaacatgtcctgaatggtttgcagctcatttactgcttcatcaacgaaaattttatccacgtattcctccagggcatgatcgcaataatttcggcggctagtttgccatgaagatgacgataaatcagcattcacgcgcggtgagtgaggaaaaatacgtttaaaacgatcgattgcgctacgagtcgggtaaactgtaggaaaattagaaatagagacagataaatgaaaaagaaaacaacacttagcgaggaggaccaggctctgtttcgccagttgatggcggggactcgcaagattaagcaggacacgattgtccaccgaccgcagcgtaaaaaaatcagcgaagtgccggtgaaacgcttgatccaggagcaggctgatgccagccattatttctccgatgagtttcagccgttattaaataccgaaggtccggtgaaatatgttcgcccggatgtcagccattttgaggcgaagaaactgcgccgtggcgattatagcccggagttgtttttggatttacacggtctgacgcagctgcaggccaagcaggaactgggggcgttgattgccgcctgccgccgtgaacatgtgttttgcgcctgcgtgatgcatgggcacgggaagcatattttgaagcaacaaacaccgctgtggctggcacaacatccgcatgtgatggcctttcatcaggcaccaaaagagtatggcggtgatgcggcgttgttggtgttgattgaagtcgaagagtggctgccgccggagttgccctgaggagttgagcgcgttgcgccaggtacgggtaatggcaggggcgaatgcccctgcctggtgtatctaagggttacaactcattcagtatgtactggaaccggcaagtagaatcgattggctgcatactgctggtatcaacacgcacgaccatatcgtgtaactgtttgtccgttatagggtgtcgatttggcgtgacgctgacttccgccttgtcacatccgctcgcggtaaaagttatcatctgtgcaacccagcggcagtaaccacctgtttcattcatctgcgtactgtcgcacaacttcccatctttcatcaaatacgtactaagcgttttctcaaccacaccgcccgtgctctgcagggtgagcagtttactcttactgacataattctcattccaactaacgtcataaggttgaacagaaacggatggacaaatcgtgtcgtgactatcaggcccctgatacgtcacgccccctggagaggcttcagagtcattcataataaccaaccatggacaagaaaagtaagattcaatctctgcagagacaataacctcaaatgtataatacccgcagttccacccagacggtaatccaggacaacttgctttgttgatattttgatggtagccaatcagcttaacgctaggggcaggaggaggaccactccagctcacattttgcaatatttccccagtcatgagccattgactacttttatattcaccaacgtacactgcggatggcatcattatttttaaattaaaagtcgcaatattacggctatcaccgttgtaaccgtagtaaacgtcaacgctatgcccggcagccatagcttctgtagtagcaataagcatgaccagagcgaacaaccatcgtagtattttcattttaaatatactcaaatgtcgcagttaaagaggcggtaaattcaccgatcgtcacatcacggccgcttttcgcctgtagccaggctctgaaattgatatcgttattgccattggttagcgcaaaggtcgccccatttgtattgttgatggcaacctgcattccgtcggttttttccatgccaattcccactccctgagcggtactactcgtatccagtgccagaaaaccgggttgttcgctgtcttctacccccgtgagcgtgacttttacgttgtatcccgccggccctttgcaatctttcagcttaaagactacgggtacacgagcggactggcctgcaacgttcaaatcctgacgactgaccgtgggaaagcgcacctctgccagatattggccatccaccaccagcgcacaggatttacttaataaattaccggagaaatgcagattattatctgccgcgaataacgtgctactcattgccaatatcagccccgctaacaggacgtaaccaccggactgaatcatacttttattcattgataatccacccgtaatgttgcgtaagcgctaaaattcgtatcgcttaacacagcatcactcgcttttaccggtacggcctccagcttcggcttttgcgtaaaatcagtggcgttgatagcaagcggagtattgagtttaaaacgctgaccatcgtgctgaagctcgataccaaaaccgggtacatcagtttcaattgctgcatcattaaaactggtttgtgtaccagtccaggtgagggtcatctcccaatctggatgacgggtcgtgctgtcacaagtgagttcatatggcacctctttacgaccatagttgccgttgatgtcgtcgataatgagatcgcgaaattcgacttcaatggttttaccaccgctgatgctacaggttggcggactcaataatgtcccgtgaaaggtgatgtcttcatcagcagcatgagctatggcgctactgacacaaagcagggttaagaaagtctttctcattgatagtccaccaccatggtcaaactggcgttaaactcgcccgcagcaagttgcgccccgcttgccttcacaggtacagccttcaactgtggctggttattgatattaaatggcgtccagctattttcaccgacggcaaacaaactgttatcggcgctattttctatccgaatgcccagcccggtgatattggtactgagtaccgtttcgccgttaatcgtactggtattgcccttaagttgcatccgcaagtcgttagcaagactgtttgtgcagttcaacgtgtatttcgcatcttgccgataattggtgccatcaacgttatcagcaatcatattgccgaactctacctggctgcccttgatactacagggtggcggagcatcgaccaacacgcgcagaattaaatccacgggtttactaccagccatagcagataaactacagacactgcataccagcagccctgcgcccactacaaacttttgactcataactccccccgtcatcagcctttgcggctctgctcttcatccacctggcagctgttgccattgcactggaagaacagcggcatccgtgcgccaaagtcgttgacgtaagtcagcaccggtacgctatccattttcacattcagcggtaccgtggttttcggctcaatgaccagagggctgaaccctgcagctggattaccgtttttctgcgcactggcgttgctgataatcacgtagtacggcgttgggttattgacggtaaatgcctgaccgctgcgggtgagcgtcaccttgtgctgccacggacttttcatactgaccttttccagcgcctttggtcgccagaacaacttgatacgcgtttgcagcgcgatttgcagggtattgggtttgttactttttggcgggatctcgcgcacgttaaagtagaacatgctttcacgatcggctggcaatttgttgatatccggcattccctgcacttttacctgcccgttcatcatactatcgatgcgttgcactggcggcagcacagttaacgggctggtgatcttgttacccttttcatcttcaatccagctttgagccagataagggagtttcggatcgttattacgcagcgtcacgctgatacttttgtcgctttcattaaatatcaaacgggtacgatctggcgttacagacgccagggcagacaaactggtagcgctaagcagtaacgccagcgtcatagcacccaatttggcagagcaaagtaaatcagacatggatcattccttaatcacgttattggttagcactaacagaaacagggggatcggtgggtgtcacctgttgcgtctgctcctgaatgacaggctttatgtcatcaggaacaaccggcgcgacgttgcctttatgctggcatggcagtaacaagccgttaaacagatcggcaggcagcgggtccggcaggttgatatcgcaatgcgcaacaccactccagaacacactcatatgttcgccaggtttcaccccagccagatagacactaccgtcatcatcgacaaggcccactgtctgctcgttatcattttttacttctgcgccaaacggtggatggctgccatcttgtaaacgcagcaccgccatcgctttttgaccactgatgacggcaaatttgcggtagccaatggctccttcagttagcgtggcttgcaccacgctctgggttgcttcggcgttttccggcaatttgttgaggtcgatatacgcctgattgcgataataattgttaacgtcagaaacgacggctttaccaaacatattggtataaacagcagccccgttaccttccaccggaacatcggcaacgccatcggcatcaatcagcaggcgtgtcccgcccatattctgggtacggtgaagtgcgccgccgtgggtagtaagcgttgcgccgccctgtaagctcaagcccgcagaggtgtattgcccttcatggtagttcgcactgaggtcaacctgcgccaggctaccatcatggctgtagtagccatcaacgctggtgtgtttgtcactggtgccgatgttcaactgatagtgagtcgcgtcatcgacacggctaaaataaccgacctggctgctgtccgtcccactgccatagttgccgttatagctaacggtactgttgtcgccccacggcatactgagcgaaatttacatgcccttatccgcccggttgtcatactcgtagcggtagccagtcagggaaacgctcatattacgaatgctgcccatattgaaatagtgggagagcatgatgttgtagtttgtctgctcctcacgatcccagtaggtatggcgggtatagttgagataaacgctaacacccgcatcgcggaagttctggttataagtggcggtgtacatctctttgtcgttgcccgtacggaccatttcgctgtcactggcatccagatactcgctcatggtcataaagttctcttcgctgaagcgatatccagcgaaagtgacgcggctgttgagctggtcaaagtctttggaataactcacacggaaggagttaccgtccaggctacctttgccataagcggtgtctttatccagtttggtatggctatgagtaacatcaaacgcgaccgcgccgaaggtagacaaatcgcgaccgacgcccagcgccgcagactgatagttttcatcacccagcgcaccgccatataagctccagccgttagcgatgccccaggaggcttcagcaccagagaaaaatcccccctcgacatggtggccccactcttgcggacgtcccatcatgatcttatagcgaacctggcctgggcgagtgaggtatggcatgctggcggtgctgatgtcatattcctgcacctggccgttctgttcttcaatgcgaatatgcaacgtaccggagacggaatcaccaagatcctgaatacgaaacggtccagccggaacctgcgtttcgtaaatcacacgccccatctggctgacggtcacttttgctgtggtgtgtgccacgccggaaatgtctggcgcgtagccgcgcagattgggaggcaacatttgatcgtcagtgctgacactgccaccaacataattaaaaccgtcgaaaatatcggaattgaggtaatcttcgcccagcgccagtttggcttttaaactcggtaacgcccgccaggcataatagcgactccactcccattttttttgtgtgtcatcgccgccaaattcatcgtcatcatcattactgcgcgtatgttgatagttggtctgccagtcagcgcgcatacgccatggccccaggttaaccccgaccgtcccgttgccgctgatctcgttactgtcatcgccgccattttcttcgtgtcgtgtttgcgcagtgatgctgtagtccgcaatgatcccggagatgccatcatcccaacgagaaggtggatcccagtcgggccaggcatattcgaggtaagcctgcggtagactaatgactaatgcggactggcttaaatcagccttaatttccacgccttccagttgaccgggcttcaggcatttaccatcgtggctccattgcagatttttcgccacgtcttcttttaaaccaaactgcgccaccagttccggtgtcagacaagcatagcttttgctaacgtcatcttcaccagcataccagtaaatatcgtactcttccgccaatggctgtttatttagttgaacctgtaaattgtattttccgggctcaacatacccctggctggaaaaacgcttcagatcaatttttgtgtcgccttttaattccagaaaacgggaatcaaactgaatgtcgtcttcagcccagacactgctataactcccactcattgccagcgcaatgcaccacggaagaatccgtaatcgaaaaagagaatggtcaggcatacacgtttttatccgtttttattcttgttcggtcaaaatccatttaaataccccatagcagtgtcgctatgggggtatgccttacaggtaagtaatctggaaggtggtatttgcttcgaaattacccagatctggcgcatcagctgcgccgaccagccaggctttaaagttcagagtctgcttcgctttgcctttattagtggcagtatctttcacgattttctggtcaatacccatgccgcttttgtaagaggtacccagagagtcaccgatcgccaggctaacattgttaaatgccgcaccggtatcggtattgaaaatggtgtaataattgccgctatttgcagaagaaacggtaccagtaaaggtagtggtcattgtttcctgagtatcaaatacgcaatcttgcaggcgaatctggaaatttttcggcgtggtggtgccgttatttttcagtttttcggcaccgatatcacccatatcaacttccagtttgtgatcgtccggaacgatagaacacacactgtcttcaatggtgccgtaaaaacgtgcagtaccgttgttacccgcagcgattgttgccgtagaggtgaacgcgcccatcaccattgccgcagcaatagctgttttaacaaacttactcattatttgtccttaaactataaataattaaaatataaacattgcaatacattgattcagtcaatagccaatgtttatacccagccattgaatacggcatgcgatccaaaaaaacaggtcgtaaaaaatgtattcgttggtgtggggtcgaatagtgatgttttcactcccctgattcaatttaattttactaatgagtaaatgtagatttaattaatatattgataggggaaagattatcttaaggatcttctaaaaaaacacgaaatatatatttagaaaaaacaggaagcatatcaacaatgaatgccaatagcttaaaaaacaaacaatgaacatataatgcgattggcattaacccgcttttgtcgatataatatataaacactatagccagaatttaatcaagtttcaattacgtcctgcctgattattcaactctattttctccattatctgtattaataaatgataatgagtgtcaaacagacattattcatttcaacatgtaactttgggcaaaatcaagatacgcgcagaagaatactttccgaatgaaagttaaaggtgttttatttatagatggggagagtcttcgatagtagtgaggttgacagatatccgctgcctgatgagcaattatgcccaatgaatctacctcattgggcataatttggaactcatcagatagcttttgccatcttcagattacacgggctcatctgccagttgaatgtgccgtttccgctttcatcaagcgttacgctggcaatggcgctggtggtaaacataggcggcgtttcgcccggacataactcggcaaccagatacccgactaacggtaagtgagagatcaccagtacgctagcaacaccttcattggtcaacgcctgcaaataggcactgaccagaccaacatcgccgcagggcgttaactccggcagaacttctgcactggaaggcaggttcagacaatcccctacttcttccagtgtttgctcggctcgcaggaacgggctcaccagaacgcgttcgatttccactttttgacctttcagccagttcgccatcaggcgagattcgtcacaaccattagtggtcagaggacgaacggaatcactggcggcatcgagggctgcgtcgccgtgacgcatgataaaaacttgcatattgcaccgcttttgttaaccagattcgcccgttttctttcatctgaaaccagagaaagaaaacggtggccggcattgtgccttatccattcaccgaatgaaacgctgttttttacctcaatggcgtaagtatagtcaatatgcgtttacattttgaccaacactccgccattcagcgcggattcatatagctttgaccttcttattgcaggtcagttgcagttgttttccaaaaactttccccacgcgcgcccatctcgaccaaacgctcgcaaggggtaaaacgggaaccatactgcgtggcaagtcgttgcattattgcaaccacttcgcccgcgccgagagaatcgatatagcggaacggtccaccgagaaatggcggaaaaccaatgccaaataccgcgccaatatccccgtcacgcacgctacggataacctgctcatcaacacaacgtactgcttcattcagcatcaacatcacacaccgttcagcaacctgcggtgcggagattcgcccctgcccttgtgtgccaatcagcgggtaaatggcgggatcgacctgttttttgcttttacgccctttctgaccataaagatagaaaccccggccattttttctgcctttgcgatcgtcgttcaaaatactagaaacaacatttgcaggcgcgctaaaacgttctccataagcggcttccagtacaggaataattttagtcccggtgtcgattcctacctcatccaaaagttggattgggcctaccggaaaaccaaatttcactagcgcggcatcaatgtgctctacccgttcaccttgggtcaacatgcggatagcttcattaatgtaaggcgctaagatgcgattgacgtaaaaaccggctttgtcacgcacgacaattggcgttttaccctgttttttcgccagttttactgtggtagcgatggtttgcgcgcttgtccccgcatgaggaataatctccaccagcggcattttttccaccggactgaagaaatgcaggccgataacttgctcaggtcgcgtggcgtgagcggcgatatcaccaatcggtaaagaactcgtattgctagcaaagatggtatgagcggcgcaattttgctcaacttccgccaccatctgttgtttcaattcgagattttcaaacaccgcttcaataatcagatcgcgatgggcaaagccgcgatagtccgtcgttccggagattaatgccagctgtttgtcacgttcgctggctttgagatgacgacggcgaactttgccctccagctgatcccaactgtacttcagcgcatgatttatgccctgcgggttgatatctttaattctgaccggaatccccgctttacaagcagtgacataagcaataccgccgcccatcaagccaccacctaaaatccccacgctgtttaatggcgcaggcggcgcatcactgccgggatctttcttcacgtccgtactggcaaaaaagatactacgcagcgcctggctttgtggcgtcatcgccagttcgccaaacgcccgagcttcggcgtcataaccgctgctggtgccctgcgctaatcccgtttcaacaacctccaggatgcgttctgtcgccggataattgccttgagttttgtgttctgttttcttgccgaccattttgaacagcagcgcacgacctaacggccccgccagaatacgctcgcgtacaggtagagggcgggaagatgggcgctccttctttgccagctcaacagcggcttccagcagaatggagtgcggaacaacgtcatccaccagccccagctttaatgcctgtttcgcccgaagttgttttccggtgaggatcatctctaatgctgtgctgacgcctatcagacgcggtaaacgctgggtgccgccactaccgggtaacaatccaagttgtacttcaggcaaaccgagcaccgttttaggatcgtcagtacaaacgcgaccgtggcacgccagcgccaactccagcccaccacccaggcaagcgccatgaatagccgcgataacctgaatgggcaaagcatgaatctccgccatcaactgttggccctgccgcgccagagcttccgcttcttgcgccgttttgcagttgccgatcatgttgatgtctgcgccagcaatgaagttgtccggtttagcggagacaaacaccacgcctcgcaactctttgttttcacggagttgcttaataatggcgcgcacctggctggcaaactccgccttcagggtattcattttctcacccggtacgtcgatggtgataacggcaatgttgtccagacgaacattaagggtaaacgcacttgtcatttccattattccgcctccagaaccattgccgcgccaagcccaccggcagcacaggcggtaactaaaccaaatccaccgccgcgacggcgaagttcatgcaatgtctgggtaatcatccgcgcgccggtcgccgcgaagggatgcccgtaagcaatgctaccgccaagcacgttaaatttgctatcgtccacttcgccagtggcatgtgcacgccccagtgcttcacgagcaaaacgttcactacccagcaactgaatattcgccagcgtctgagctgcaaaggcttcgtgcatatcgatcaatgtcagatcgctcatcgtcaaaccggcacgctccagcgccagcggtgtactccaggctggaccgagcaacatgtcctgccagacatcaatcgcagtaaatgcgtagctgcgcagataccccagcggcaccagccctaattctttcgcccgggattcagtcatcaggatcaccgctgccgcgccatcggtcagcggcgtactgtttgccgccgttaccgttccgtgtttgcgatcaaacgccgggcgcagctttgcgtaatcggcaaggctggaattaccgcgaatattgttgtcttcgacaagcggttgtttataaggagggataaaggcagtcatcacctcttctttgagttttccgtcactccatgcctgagcggcacgctgatggctacggtgcgctaatgcatcttgctgttctcgggtgatgccgtaggttttcgccatttgctctgcggtgtcgcccatccgcaagccggtagaatattctgctaccgcaggtggtacgggcattaagtcgcgcaaacgcaggcgagagaagagtttcagtcgctggctcatggtacgagctttgttgacatcaaccagcacgcgcgccagttttttactgacgccaattggcaatacgctagaggaatctgccccaccggcaatccccgctcgaatagttcccgccatcaggctttctgcgacgtttgcaactgcctggaaactggtagcgcaagcgcggctgacgctgtaagcatcggtatgtacattcattcccgtaccgagaacaatttcacgcgcaatgttgggggcttcaggcatttgtacgacctgaccaaagaccagttgttcaatcacttcggcggggatctcgctgcgtgccagcagttcgcctaccaccatcttccctaaatcaaccgcgggaatgccatgaaaagccgtcgcctgacgggcaaaaggcgtacgtaaaccgctaacaatggcgatacgatcgccctggcgggtaaccagcggtaaaacctgacccataacactcccctgtaaaaaaataaataaagtggtctgacctgatcatagtcttaaccatttttttacatttagccaagtggagaaaagggaaagtgggagctatgacacagagagaaaagaagaagagaaaagaaaacgcccctgccagcaactgacaggggcgtacgtacccgagaggaattaacgcagacccagctggaaaatcagcatttcagcttcgcaggcaaaagtgaaatcgatatccaggcgcacaccgtcagactcttcagtgaaagtcggggtgattttgcaaggttcagattccacgctacgggctttttcagtcagcgccgccagcgtttgctctgcttctgcgcggtttgcaaacacgcggctgtaagacgcggtgcagtcggagttgtccataatggtgccaacatccatacagcagcaaaccggggtttcatcagcactacatttactcatcgttgatttcctctgtatgtgcacccaaggtgccagataaacgttgtggatattttacgcttccggaaagtgctgctccagttgttaattctgcaaaatcggataagtgaccgaaatcacacttaaaaatgatctaaaacaaaattcacccgaatccatgagtgcgccacctccaaattttgccagctggatcgcgtttcttagatcatatttgaaaaaagatagaaacatacttgcaacattccagctggtccgacctatactctcgccactggtctgatttctaagatgtacctcagaccctacacttcgcgctcctgttacagcacgtaacatagtttgtataaaaataaatcattgaggttatggtcatgagccagaaaaccctgtttacaaagtctgctctcgcagtcgcagtggcacttatctccacccaggcctggagcgcaggctttcagttaaacgaattttcttcctctggcctgggccgggcttatagtggggaaggcgcaattgccgatgatgcaggtaacgtcagccgtaaccccgcattgattactatgtttgaccgcccgacattttctgcgggtgcggtttatattgacccggatgtaaatatcagcggaacgtctccatctggtcgtagcctgaaagccgataacatcgcgcctacggcatgggttccgaacatgcactttgttgcaccgattaacgaccaatttggttggggcgcttctattacctctaactatggtctggctacagagtttaacgatacttatgcaggcggctctgtcgggggtacaaccgaccttgaaaccatgaacctgaacttaagcggtgcgtatcgcttaaataatgcatggagctttggtcttggtttcaacgccgtctacgctcgcgcgaaaattgaacgtttcgcaggcgatctggggcagttggttgctggccaaattatgcaatctcctgctggccaaactcagcaagggcaagcattggcagctaccgccaacggtattgacagtaataccaaaatcgctcatctgaacggtaaccagtggggctttggctggaacgccggaatcctgtatgaactggataaaaataaccgctatgcactgacctaccgttctgaagtgaaaattgacttcaaaggtaactacagcagcgatcttaatcgtgcgtttaataactacggtttgccaattcctaccgcgacaggtggcgcaacgcaaagcggttatctgacgctgaacctgcctgaaatgtgggaagtgagtggttataaccgtgttgatccacagtgggcgattcactatagcctggcttacaccagctggagtcagttccagcagctgaaagcgaccagtaccagtggcgacacgctgttccagaaacatgaaggctttaaagatgcttaccgcatcgcgttgggtaccacttattactacgatgataactggaccttccgtaccggtatcgcctttgatgacagcccagttcctgcacagaatcgttctatctccattccggaccaggaccgtttctggctgagtgcaggtacgacttacgcatttaataaagatgctagtgtcgacgttggtgtttcttatatgcacggtcagagcgtgaaaattaacgaaggcccataccagttcgagtctgaaggtaaagcctggctgttcggtactaactttaactacgcgttctgataacgcgttcgcctggataaagtcacctgcatagcaggtgactttaactcccccacttcaccgaaagtagtgtcctcattgcttacctcctgagttttgcaaacagcctgttggcagcttgccctttcaaatcaataagcggtatccacagacaaacctgaagggaaaggcatattttcaggcgttctgctcgtccttctcaaagagtttacttttctgcatttccaggatactcccccccccctggctattgtgcgctcatacactcaaattaaagataggttctaaataaatgagcgttttttgatagtctatttcattaggtaatatatatttgtaacaaatcaatcaaaatggaataaaatcatgctaccatctattagtatcaacaataccagcgcagcttacccagaatccatcaatgaaaataacaatgatgaagttaatggattagtacaagagttcaaaaacctttttaatggtaaggaaggaataagcacctgtattaaacatctacttgagcttataaaaaacgccatacgagtaaacgacgatccttatagatttaatattaataattccagtgttacttatattgatattgactccaatgatacagaccatattactattggtatcgacaaccaagaaccaatagaattacctgcgaactataaagacaaagaactcgtccgtactatcattaatgacaacatagttgagaagactcatgatatcaataacaaggaaatgatcttcagcgcattaaaagaaatatatgatggagatcctggttttatcttcgataagataagtcacaaactcagacatacggtaacggaatttgatgagagcgggaaaagcgaaccaacggacttatttacctggtacggtaaagataaaaaaggcgactctctcgctattgtaattaaaaataaaaacggaaatgattacttatctctcggttactacgatcaggacgactaccacattcaaagaggaattcgtattaatggtgatagtctcacccaatattgtagtgaaaacgccaggagtgctagtgcgtggtttgaaagcagtaaagctatcatggcagaaagttttgcaactggttccgatcatcaggttgtaaacgagctcaacggggaaagactgagagaaccaaacgacgtttttaaacgttatggtcgagcaataagatatgattttcaagtggacgatgcaaaatataaatgcgaccatctaaaagaaatagtttctactttagtcggtaacaaaattaacgttggccattctcaaaaaatatataagcattttaaggatctcgaaggtaaaattgaagaaaggcttcaaaatcgccaggctgaatatcaaaatgaaattaatcaaccatctgcgccaggtgttaattttgatgatatttaaaattatttttccagttttttgatttttcaacagctgaatatcggaaatagtcagtgacgaacatcagtatttttacataattacgtctaggtcattgtcggtttatctccttttacttgtggtaattgagggataacaacaaaaaaggtgagttttgcgactcaccttttttatttgtttcttattcagaatcaatatcttttaaatcatcctgaatcgcttgtgcgttcggattttcctgcggtttgagttcgccgccattagcgatgaaatcatgacgctggaagtacgcttcgcgcaccataatataaggatcggagctctgacgcagcagaccatcggaatccagcagctgagcgcgggtttcgatcccttcaagcgtccatttacccacagacatcggccaggtcagccaggaaagaaccgggtaaaaaccatccgccatatcaccaccgtcatcacgcagcgtgaagctaccgtagaacggtaactgaacgtaaggcccataacccacgccataatgaccaagcgtactaccgaagcggtgaggttcagtccgttgcagtttcgggttcgccatccctgcaacatcaataaaaccgcccatccccaaaatggtgttcaggaaaaagcgggtaaagtggaccatcccctgataagggtcgccctgcaagaagtagttaaccatcaccgcaggttcttcaaggttgccagtaaagttgctcaaaccgttacgcgccggttgcggaacataatcacgccaggcgacagcgaccggtcgaacaatatacgggtctaatacattgaagttgaagttgtacatggtgcggttgaacccttctaacgggtcagaacgcccttgctgatctgtaccggaactcgcacaccccaccagaagcgtagttcccagagcaagcgcgctcaggcgaagcttcataaatgtctccctgtttttttatggcttatgcagtttgccatccatgacggaacgataccgtatccgcctgtttaggtgtgggcgattgtaacagcacgtcaactgatgtccagacgccctgatttgctgatttgatcatagcctggtaatcgccgccctgtaggctacttgattctatagaaacagaaaaaggcaaacgcagccttttctacattttcagagtaactcccgtcagttgcgagcaaaaaagccgctacgctttagctatacgtgctaattcaagagaagagaccatggacaacgacaaaattgatcaacacagcgacgaaattgaagttgagagcgaagaaaaagagcgcggcaaaaaaatagaaatagatgaagaccgactcccctcccgggcgatggcaattcatgagcatatccgccaggatggtgaaaaagagctggaacgcgacgcaatggcgctactgtggagtgccattgcggcgggtctgagcatgggcgctagcttactggcaaaagggatatttcaagtcgaactggaaggtgtgccgggcagcttcttgctggagaatctcggttatacctttggttttattatcgtcattatggcccgccagcaattatttaccgaaaataccgtgactgcggtactacccgtcatgcaaaaaccgacaatgagcaacgtcggcttacttatacggttatggggcgtcgtgctgctgggtaatattctcgggacaggtattgcggcgtgggcatttgaatatatgcctatcttcaatgaagaaactcgcgatgcatttgtcaaaatcggcatggatgtgatgaagaacacccccagcgagatgtttgccaacgcgatcatttccggctggctgatcgccactatggtttggatgtttcctgcagcgggtgcggcaaagattgtggtgattatattgatgacctggcttattgccctgggtgacaccacccatatcgtggtcggttctgttgaaatcctctatctggtgtttaacggtacgctgcactggagcgatttcatctggcccttcgcactacctactttagcggggaacatctgcggcggcacctttatcttcgcgttaatgagtcatgcacagattcgtaacgacatgagcaataagcgtaaagcagaagcacgccaaaaagcagaacgtgcggaaaacattaagaaaaattataaaaacccggcataaatggcgagggtttaagcaatcgagcggcagcgtacttaccccgcactccattagcgggtatactcatgccgcattgtcctcttagttaaatggatataacgagcccctcctaagggctaattgcaggttcgattcctgcaggggacaccatttatcagttcgctcccatccgtaccagtccgcaaaatcccctgaatatcaagcattccgtagatttacagttcgtcatggttcgcttcagatcgttgacagccgcactccatgacgggtaaaaagtggataaaataattttacccaccggatttttaccctagagccatacagcctcacactcgatgaggcctgtcagtttcttaaaatatcctgatctaccatcgccgtcatagagcgtatttttattacctgatttgcaggttcgattccctattcggagatagcactcatgcaacacgaactacagcctgatagtctggttgatttgaaattcatcatggctgatactggctttggtaaaaccttcatctatgaccggattaagagtggcgacctgccaaaagccaaagttatccacgggcgagcaagatggttatatcgtgaccattgtgaattcaaaaataagctcttaagccgcgccaatgggtaaaatagcgggtaaaatatttctcacatctaaaaaacaccattccaatcaatcccctgctgcttcaagtagatgtctgcaggggacaccatccttgtgtttatccctaaaaccacataaaaaccgtaaattaaattcgaactagcaggccgaataaggcacaccaggaactcgtggttttattcattaactagtggtttttacctgttctcttagccagataataaacgcttcaatttttggccactgcctgcccggtaatgtggtgatgtaataatgctgatggcatttcaccgtcatatcgccaaacggcgcgacgagctcaccactggcaagccttttttgtaccaggcgttttcttcccatcgccaccccaatatgattcatcgcggcaataacagctaaatcagaacgatcaaagccaattccagaagatgtcggcaaattaaccgcataatgttgcgcccaactatgccattcatccgtaccggagtcgttgctccatgcctgtctgtcatggagcaacgtacagtgacacaggttaattaccgtgttggttaaagcatgtctttgagcgtattccgggctacatactggcaggatttcttcatccatcagaaagtgatgagtgagttgcgcactcggcgcatcatcaaagtagatcgccaaatcgattccggcacgttgcagattgacgttgtcattaccagtgagcacggtgaggctaatagacggataccggcgtgtaaagtcacctaatgcgggcaccaaccagcattgggcgatagagggccgggaatacagagttaacgttccgcttaactcctgatttttgatatcaagaatttcctggttcagggtatccaggctgctttttagcgcccaataaacacgtttcccctcgtgcgttaattccactttgcgatgggaacgaacaaacaactgaatgcccaattcttcttccagctgattgatacggtgacttaccgcactggggctcaggctcaattcctctgccgccagggcgaaggactgatgcctggcagccacttcaaaagtatgcattttacttaattgccagccgttaagcagccgatttcttatttcacgaaggggttccataatcacctcatttttcgcttaagtgtaaaaaaatagcggcaaaatttcagctatgagatgagctaaagtgaaccatatctcaattcaccttcatttttagatgtaaatcactccattgatgcaatttacctcatgtgaaaggcaaattttatcgtttgtcagcctgcgttgtttttttgtccaatatcatcaggttaatcacaggggaaggtgagatatgcactctcaaatctgggttgtgagcacgctgcttatcagcatcgtgttaattgtactgaccatcgtgaagttcaaattccacccgtttctggcgctgttgctggccagcttcttcgtgggaacgatgatgggcatggggccactggatatggtaaatgctattgaaagtggaattggcggaacgctggggttcctcgcagcggttatcggccttggcacgatactgggaaaaatgatggaagtatccggggccgcagaaagaattggtctgacacttcaacgctgccgctggcttagtgttgatgtcattatggtgctggttggcctgatttgtggcatcacgctgtttgttgaagtgggcgtcgtgctattgattcctctggcttttagtattgccaaaaaaaccaataccagtttattaaagcttgccattccgctatgtaccgcattgatggcagtgcactgcgtggttcctccacatccggctgctttatatgttgccaataagctgggcgcagatatcggtagcgtgatcgtctacggtttgctggttgggctgatggcaagtctgatcggtggcccacttttccttaaatttctgggtcaacgactgccctttaaacctgtacccacagagtttgcagatctcaaagttcgcgatgaaaaaacactaccgagtttaggcgcaacgttattcaccatactgctacccattgcgctgatgttggttaaaacgattgccgaattgaatatggcgcgtgagagtggtttgtatatcttggttgagtttattggcaaccctatcactgccatgtttatcgccgtgtttgtcgcctattatgtgttgggtatacgccagcatatgagcatggggacgatgctcacacatacggaaaatggcttcggttctattgctaatattttgctgattatcggggccggaggcgcattcaacgccattttaaaaagcagcagtctcgctgatacgctggcagttattctctccaatatgcatatgcacccgattcttctggcctggttagtggctcttattctgcatgcggcagtgggctccgctaccgtggcaatgatgggggcaacggcaattgttgcacccatgctgccgctgtatcccgacatcagcccggaaattattgcgattgctatcggtagtggtgcaattggctgcactatcgttacggacagccttttctggctagtgaagcaatattgcggcgctacgctcaatgaaacatttaaatactatacgacagcgacatttatcgctagtgtcgtcgctctggcgggcacattcctgctgagttttatcatctaagcgcaaagagacgtactatggaaaacgctaaaatgaacagcctcatcgcccagtatccgttggtaaaggatctggttgctcttaaagaaaccacctggtttaatcctggcacgaccagtttggctgaaggtttaccttatgttggcctgaccgaacaggatgttcaggacgcccatgcgcgcttatcccgttttgcaccctatctggcaaaagcatttcctgaaactgctgccactggggggattattgaaagtgaactggttgccattccagctatgcaaaaacggctggaaaaagaatatcagcaaccgatcagcgggcaactgttactgaaaaaagatagccatttgcccatttccggctccataaaagcacgcggcgggatttatgaagtcctggcacacgcagaaaaactggctctggaagcggggttgctgacgcttgatgatgactacagcaaactgctttctccggagtttaaacagttctttagccaatacagcattgctgtgggcagtaccggaaatctggggttaagtatcggcattatgagcgcccgcattggctttaaggtgacagttcatatgtctgctgatgcccgggcatggaaaaaagcgaaactgcgcagccatggcgttacggtcgtggaatatgagcaagattatggtgttgccgtcgaggaaggacgtaaagcagcgcagtctgacccgaactgtttctttattgatgacgaaaattcccgcacgttgttccttgggtattccgtcgctggccagcgtcttaaagcgcaatttgcccagcaaggccgtatcgtcgatgctgataaccctctgtttgtctatctgccgtgtggtgttggcggtggtcctggtggcgtcgcattcgggcttaaactggcgtttggcgatcatgttcactgcttttttgccgaaccaacgcactccccttgtatgttgttaggcgtccatacaggattacacgatcagatttctgttcaggatattggtatcgacaaccttaccgcagcggatggccttgcagttggtcgcgcaagtggctttgtcgggcgggcaatggagcgtctgctggatggcttctatacccttagcgatcaaaccatgtatgacatgcttggctggctggcgcaggaagaaggtattcgtcttgaacctagcgcactggcgggtatggccggacctcagcgcgtgtgtgcaagtgtaagttaccaacagatgcacggtttcagcgcagaacaactgcgtaataccactcatctggtgtgggcgacgggaggtggaatggtgccggaagaagagatgaatcaatatctggcaaaaggccgttaataacgtttcaacgcagcatcgcaatcctttccctgggtgagcgatgctgccgatggcgcagacttaagatccccggtcttacccgctataaccccctccttttatcatcacccaacgcctttcgctgtaaacggcggtttcgcaaaccaaaccaaaaccgtaagtaagataaaagcaatagccgccatacggaaaatctcatttgcagaaatagaaagactctgctgggttatttcattattaatttcattaagaactccactaaggctaccataatatttatccataatttgactgctactattaaacacggggttaaattgatcgatggttgctgtcaactgactatggtgtaagctttcgcgtcgtccccacagcgtcattgtcaagctcgtaccaacacttccactcaaggtacgaaaaaaattactcatactgctggcattggcaaatttattatctggcaagccactaaagctaatcgttgttaagggtaaaaagaaacaggcaacggcgaatccctgaaaaaactgcggcaaaatgatgcctgtaaaatcaatcgttggcataaatgtcacagaacgccagtaatagcaaaccgcatacatcaaaaaactaaatgtcactaacaaccgcatgtctattttgttgccataacgtcctatcaaaggactaattaatagtggcatgatgccgatgggcgcataagcaagtccggcccatatcgcattataccccatcgtttcctggagtaactgcggcataaggacgatcgctccagagtaaaataaatacgcgcatgtgatactcacaataccaatggtgaagttacgggacttaaacaaactgagatcaagaatcgggttctcactggtgctctcccaaatgactaaagagatcagagaaataacacttactactgttaatattattattgtactgctgttgaaccaatccagatcgcgccctttatcaagcataatttgcaagccaccaacaccgagcactaacagggtcagtcctggtagattcattttgaccggactagtctcagtttctcttcctttaagtaaggttaagcataatgtcaggacgataatccccatagggacattgattaaaaatatccaaccccagctaaagttatcacaaatataaccgcccaatatcggcccacatatcggagcgataatcacggtcatactccataatgccagagcaaatgttcttttttctggcggataattccttaataataaactctgactcagtggaattaacggccccgccattaacccctgaacgactctaaaaaatatcagcacatcaagattggtgcttaggctacacattaaactagacaggctaaaaaaagtgacactaagtaaaaataatcttaattcgcctattctttgtgccaacctgccagtaacagggatcgcaatggcatttgctacaccaaagctggtgataacccaggtgccttcgtctgtacttgctcccagaaagccagatattgtcggtattgcgacgttagaaatagtggaatccaacatttgcataaatgtcgctaaactcaatgcaatagtgacgcaccataacgtcccaccggttaatggtgccggagtacttttagtgattgccattaaagttgtccattatggctaataatgttgctaatttctttttctatcggactggtatcgataactaaagccttactggtataagccggcatggaggtcacggtactagccagctcaggcatctcggcaatgtcttcgttcttcgtatcaatagttgctgtcatgcttaaaccaatacgcaaggggtgttccatgagttcttttggatcaagagaaacttcaaccggtacacgctgaacgattttgatccagttccctgtcgcattttgtgcaggtaataaggagaacgcattgccggttcccatattgatccctgtcacccgaccatgaaacacaacattttcaccataaagatcgctgataatattgacgctttgaccaatccgtacatccgtgagttgtgtttctttaaagttggcattaacccacatttgacgtgccggtacgacagccattaagctttgtccggggctcactgtttcgccgacctgaacacttctctgggcaatatagccggtaaccggactcttaatatccgtacgtttaagcgccaaccaggcttctttagttgcatccgccgcttcaacgacttgtggctgacggtttaatggtgtgttcattactaaagctttattcgctttataagcctggatagcggcattcaatgccgctttgctacttattaacgtatctttggtatgctccagcgtttctttactaataaccccctgcttcgctaacggcactcgacggttataatcttctaaagattgttgatactgaatacgtgcactagcgacttcggcactgtattgtttatcctgtaagtatagtttattcgtttgccgaacaatatttgccagattatttttagctttattgagtgcgatagtggcatcagttttatccagactaactaaaatgtcaccttgtcgaacgtagttcgtatctttatgattaacgacagtgacactaccactgacttgtgcagaaattggatctgcattccccgtgacataggcgtcatctgtactaatcatgtcttctaattccatactccaataggcataggcaccactaaacgcaataaataaaactaccgccaataaagaaaagtattttcttctgttagaatgttttttattactattaatctgttccactattatctctcatttctcatagatgaaatttatgaattgaatgaaaagagcattcattcttcatatcaaacacagtgcatgtgttgcacattatcccaggaacgttggaggcctaatttaaatgaggtgcaaaaaaaacaacagaggactaaaccgtggcttttgcaatacaattcttacgcctgtaggattagtaagaagacttatagtgccaacttgaaactataaatcatcggtacaatccctgattttattgttgacatttcatttatgccgactatttatatggtatacttgtcgaattatcttaaaggaagctcagattttcttatttttattgagaaaatgagatgacgccttatgtctgtattactacagggagaagggagatgcttcattgcaaagggaataatctatgaacgcaataattattgatgaccatcctcttgctatcgcagcaattcgtaatttattgatcaaaaacgatattgaaatcttagcagagttgactgaaggcggaagtgccgttcagcgggtggaaacacttaagcctgatatcgtcatcattgatgtcgatatccccggagttaacggtatccaggtgttagaaacgctgaggaagcgccaatatagcggaattattattatcgtctccgctaaaaatgaccatttttacgggaaacattgtgctgatgctggcgctaatggtttcgtgagtaaaaaagaaggcatgaacaatatcattgcggctattgaagctgcaaaaaatggctactgctatttccccttctctctcaaccggtttgttggaagtttaacgtccgaccagcaaaaactcgactccttaagcaaacaagaaattagtgtcatgcggtatattcttgatggcaaggataataatgacattgctgaaaaaatgttcatcagcaacaaaactgtcagcacttataaaagtcgcctgatggaaaaattagaatgtaaaagtctgatggatctttacacattcgcacaacgtaacaaaatcggctaaccacatgaagtttttaccctatatttttcttctctgttgtggtctttggagcaccataagtttcgcagacgaagattacatcgaatatcgtggcatcagtagtaacaaccgtgtcacacttgatccactacgtctgagcaacaaggaattacgttggttagcgagcaaaaaaaatcttgtgattgcagtacataagtcccaaacggctacgttgttgcataccgatagccagcaacgggttcgtggtattaatgctgattatttaaatcttttaaaaagagcgttaaatatcaaattaacactccgggaatacgcagatcatcaaaaagcaatggacgcgcttgcagaaggtgaagtcgatatagtgttaagtcatttagttactagcccgcctcttaataatgacattgctgcaaccaaaccattgataattacctttccggcgctggtaaccacccttcacgacagtatgcgaccgcttaccagtccaaaaccagtaaatattgctcgggtagcaaattaccccccagacgaggtaattcatcaaagttttccaaaagcaacaattatctcttttacaaatttatatcaggcattagcatccgtcagtgctgggcacaatgattactttattggtagtaacatcattaccagcagtatgatttcccgctatttcactcactccttaaatgtagtgaaatattataacagcccgcgtcaatataattttttcttgaccagaaaagaatctgtcattcttaatgaagtactcaatagatttgttgatgctttaacaaatgaagttcgctatgaagtaagtcaaaattggcttgatacaggaaacctggcctttctgaacaaaccattagaactcactgaacatgaaaaacagtggattaagcagcatcccaatttaaaggtgctggaaaatccttacagccccccctattctatgacggatgaaaatggcagcgttcggggcgttatgggggacattcttaatattattaccttgcaaacaggtttaaatttttctccgatcaccgttagtcacaatatccatgctggaacacagcttagccccggaggatgggatataatacctggcgctatttatagtgaagatcgagaaaataatgttttatttgctgaagccttcataacaacgccttacgtttttgtcatgcaaaaagcgcctgacagtgaacaaacattaaaaaaaggaatgaaagttgccattccatattattatgagctgcatagccaattaaaagagatgtatccggaggttgaatggatacaggtcgataatgccagcgctgcatttcacaaggttaaggaaggtgaacttgatgctctggtcgcgacacagctaaatagccgttacatgatcgatcattactatcctaatgaactttatcattttcttattcctggcgttccgaatgcaagccttagcttcgcttttcctcgcggagaaccggaacttaaggatattattaataaagcactgaatgcaattcccccaagcgaagttctgcgcctgacggaaaaatggattaaaatgcccaatgtgaccattgacacatgggacctatatagcgagcaattttatattgttacgacattatccgttttattagttggcagtagccttttatggggattctacctgttacgcagtgttcgtcgtcgtaaagtcattcagggtgatttagaaaaccaaataagtttccgaaaagcactcagcgattccttaccgaatccaacttatgttgtaaactggcaaggtaatgtcattagtcataatagtgcttttgaacattatttcactgcggattactacaaaaatgcaatgttaccattagaaaacagtgacagtccctttaaagatgttttttctaatgcgcatgaagtcacagcagaaacgaaagaaaatcgaacaatatacacacaggtatttgaaattgataatggcatcgagaaaagatgcattaatcactggcatacattatgcaatcttcctgcaagtgacaatgcagtatatatttgtggttggcaagatattactgaaacgcgtgatctaattaatgcactcgaggtagaaaaaaataaagcgataaaggctaccgtagcaaaaagtcagtttctggcaacgatgagtcacgaaataagaacaccaataagctctattatgggcttcctggaacttctgagcggttctggtcttagcaaggagcaacgggtggaggcgattagtcttgcctacgccaccggacaaagtctcctcggcttaattggtgaaatccttgatgtcgacaaaattgaaagcggtaactatcaacttcaaccacaatgggtcgatatccctactttagtccagaacacttgtcactctttcggtgcgattgctgcaagcaaaagcatcgcattaagttgcagcagtacgtttcctgaacattacctggttaagatcgaccctcaggcgtttaagcaggtcttaagtaatttactgagtaatgctctcaaatttaccaccgagggggcagtaaaaattacgacctccctgggtcacattgatgacaaccacgctgttatcaaaatgacgattatggattctggaagtggattaagccaggaagaacaacaacaactgtttaaacgctacagccaaacaagtgcaggtcgtcagcaaacaggttctggtttaggcttaatgatctgcaaagaattaattaaaaatatgcagggcgatttgagtttagaaagtcatccaggcataggaacaacatttacgatcacaatcccggtagaaattagccagcaagtggcgactgtcgaggcaaaagcagaacaacccatcacactacctgaaaagttgagcatattaatcgcggatgatcatccgaccaacaggctattactcaaacgccagctaaatctattaggatatgatgttgatgaagccactgatggtgtgcaagcgctacacaaagtcagtatgcaacattatgatctgcttattactgacgttaatatgccgaatatggatggttttgagttgactcgcaaactccgtgagcaaaattcttccttacccatctgggggcttacagccaacgcacaggctaacgaacgtgaaaaagggttaagttgcggcatgaacttatgtttgttcaaaccgttgaccctggatgtactgaaaacacatttaagtcagttacaccaagttgcgcatattgcacctcagtatcgccaccttgatatcgaagccctgaaaaataatacggcgaacgatctacaactgatgcaggagattctcatgactttccagcatgaaacgcataaagatctacccgctgcgtttcaagcactagaagctggcgataacagaactttccatcagtgtattcatcgcatccacggtgcggctaacatcctgaatttgcaaaagttgattaatattagccatcagttagaaataacacctgttagtgatgacagtaagcctgaaattcttcagttgctgaactctgtaaaagaacacattgcagagctggaccaggagattgctgttttctgtcagaaaaatgactaaatagcggctcccacaatgttcaaatgtgggagctatttaccagcacatcttacatttaactactgaactcctggcgaatttgttccccatgctggtcgagcgttgccgctcccggcataacatgcgggtccgcgcagccgctgatttttatcggattacccggcatcattattcccccggcttcaatcaacatatttctcgcctgagtttgtggcaatttaatggcctcagccacacttaataacggcgcgacgggtacaccaacttcatgtattctggctaaccaaacttcagctgcctgcgtttttaacgtccgctcaatatattgtttaagaatagcctggttttgtacgcgtaaaatattgctgctaaatcggggatcattaaccagttccgtaagctccagtgcctggcataacgcagaaaaaagcttgtcattaccacaacaaatcgtaatcggcttatcctgagtattgaaaacatcaaaaggtgccatgtagggatggcgatttcccagacgttgtggactcttcccagttgcgatatatgccatcagaccatgctccagaaaactcagcgtggcatcaaacatcgctatatcgacatgcgcccctctctggctcttttcgcggccataaagtgcactcactattccgctgaataaatagacaccgccgcatagatccgcaagagatgtaccaacgcgcactggcggagcatcaggatatcctgtttccatcattatcccgctcattgcctgaatgatggtatcgtaggcaggagcatcttttagcggaccggtatgtccgaaaccactgctactagcatatatgaggcgcgggttgatttcttgaagcgtttcccaactaaaccccagtttttccattgtacctgggcgaaaattctcagctaatacatcagcttgtttgagcatatttataaatatacttttatcgtgatcattctttaaatcaagaaccacactctctttgccatgattaataaaactgtaatagagactctgtccatccacatagggaccaaatgtgcgggtatcatcaccatgacccggcggctcaactttaattacccttgcgcccatattacaaagaagttgagttccgaaaggtccattaaggacatgtgtcatatcgataactaataagccttcaaacggccctttgctttcattatttgtcatttgcttatgccttgaaaaaagccgaaggtgaaaagacacttcggcatttatgtaaaatcaataacatgattaattaactaaccagtcgactgacataaatccacaagggagccgtgacgacaaagcccagtacgctcacagccaaactcgctgtaccagtacgggtgtagacattaaaccggctggcaataatgattccggagaatgccggcggtaatgcgcctgccagtaccatcatctgcagatgttcgctgttcaaatgacatgccataccaacgagaagcagtgccagtggcatcagaatcagcttcaggaaggtgttataagcaatttcggcactgaactcgaatttatgtgcagccagagtcaaccccgcagcgaataccgctaccccactgttagccttcgcaatcagattaaaggttgggtcccatgctgccggaatttttaccccaaccaacaccaggatcgttgccagaacaggtgcccatactactggctcctttgccgcagaaattaatgcgctcagattactattcttcttaccatccgctccactagaaggattcagcaaatacagaccaataggaatagtaattgcgttaacaataatagaaataattgctaccactaaacctgtacttacggaatcaccataaataggatcgagaactgcaaaccccaggaatccaatggtaggactacctgcaattaatgcacatacagctgcttctgcatgggtacgtttaaaaaatttgtagcaaccgaaccaggagaaaaagaaacatccgacaataaccacaagacttacaagggtcagacgagtgtccgcaaaaatcatttccctgtttgcccgagtaatagatacaaatagagccgcaggaagcgcgtagtttaataccagtttattaaatgcccgagcttgatcttcactaaatgtttctcgtctgccgctaaaataacccaacagcatgattacgataataggcaataaatcgccaataaaaaatgttagcataatagtatttccgataagggtcccctcaccatcgcataatgagttggcaagaggagacgatgtcagtatttaattaccagcgacttgttttgggttaagtttggtaatatggccactttcagttcctgctgcagggtcgatgaccacattaataatggtcggtttgcggctctgaataccggtggttaaagcatgacgaagttcatctgtcgtggtgacgttatagccaacgccacgaaacgcatccattaatttgtcataccttgcatggtgcaacagatccgttggacttggtgcaccagcgccactgagatcaacaccgtctcctctgtagatgccgccattattaaaaataacgatcgtcaccggcaggttatatcgacaaatcgtttcaatttccatcccactgaaaccaaaagcactatcaccttcaatggcgacaaccggagaaccagaagtcacgctagcaccgatggcatagcccataccgatgcccatgacaccccaggtaccacaatccagacgacgacgtggtttatacatatcaataatatttcgtgcattatccagggtatttgcaccttcattaactaaataaatatcctggttctcgcgcaatacgtcgcgcacagcacttaatgcattaaagtaatttaatggttgagtatctgtacttaatttttcatgcattttttgtgcattttgctgcttgtggatatttaaaatatcgcgccataccagtggagtcgtaaatgtgttttgtttcagttctgccagcataccttgcatactggatgcaatatcaccaacgactggcacagcaatggggcggttgctgtcaatttcctgcggttcaatatccagttgaataaactgtgtatctgccgcccatccttttttaccgtgtgccaataaccaattcagtcgtgcaccaacaagcatgacaacgtcagcatttgccagggcaaagctacgcgcagctgccgcagaaagtggatgcgtatcttcaaggatccctttcgccatagacattggcaggaatggaatctgagcactttcaataaattcacgaagctgttcatcagcttgactatacgccgcgcctttgccaaggataattaatggccgttcagcttttgctaaaaggctaattgcgctagtgacactcttcgggcatggcaataatgctgggctcggattttcaactttaacaatcgtggttaacgcttcgtctttttccatcgtcgcggccaggacatttgctggcaaatcaagataaactccgccagggcgaccgcttacagagacccggatagcgcgtgccaatgcaatgccaagatcctgcggctgattaacgcgaaatgctgctttggcatacggttttgccgcattcatttggtccagctcttcataatcaccttgctgtaggtcgacgatcgcgcggtcgctggagccgctaatcatgatcatcggaaaaccatttaccgttgcgttggccaatgcggtcaaaccattgaggaatcctggcgcagaaactgtcaggcagatccccggtttttgggtaagaaaaccgcttgccgcagcggcatagcctgcgctctgctcatgacgaaaaccaatataacgaatgccttccgcctgggcatggcgtgccatatccgtcacaggaatacctacaacaccataaatagtgtcaatattattctgttttaatgcttcaacgatgatatgcataccatctgtcatttgaagttgatcactcatgattaataacctcgaaatttttataaattgggagccagaagcccccgttaatatcagatggcgtggttttgcttcattgcagcaatttcatcgtcgctataacccagctcctgcaatacagcagcggtatgttcacctaatagcggcgcagctttaatatccggcgtaaaggcagagaatttcattggacaaccaacggtcagatattttccacgcaacggttgttccacttcaacaacactgccactttggcgcaaagagggatcaagactaatttctttcatacttaaaaccggtgcacaaggaatatcaaactgagtcaaataggccaccgcttcatgtttatcaatagtgacagtgtatttttcgatttcagcaaaaatatcgaaaatatgtggctgtcgtgcatgggctgtactgtatgccggatcggtaatccattctggtttgccgatggctttacaggtgttttcccagttttgctcctgaatagtgaaataaatataggcgttaggatcggtttcccagcctttacatttcaggatccagccaggctgaccgccaccacctgcattaccaccgcggggaactgcatcaccaaatgtaccattcggatactgcgggtattcttccagatgacccaatttatcgagacgctgctggtcacgtaatttcacgcggcaaaggttcaatacggcatcctgcatactcatggtgactcgttgcccacgccccgttttttcgcgatgcagcaaagcagcaagtaaaccgatcagcaaatgcattccggtgttgctgtcacccaacgctgcagcgcttaccagcggcggaccatcccaaaaacccgtagtggatgccgcgccacccgctgcctgagcaacgttttcataggcttttacattcacataagggctacactcatcaaaccctttgatgctaccaaaaatcagacgtggattgatttcttgaatatgctcccaggtgaagcccatgtgatcaatggcccctggatgaaagttctcgactaagatatcagcttcgcggatcagcttttccattacctctttgccttccgctgttttggtatttaactcaatagaacgtttgttactgttaagcatggtgaagtaaagcgcatcgatatcaggaatatctcgcagctggtgacgcgttacgtcaccaacgccgggacgttcaattttaataacgtcagcgccaaaccaggccagcatttgagtacaagatgggccagattgcacaccggtgaaatcgagaactttaattccttgaagtggagtactcatagcaatacctattagttaattaaatatgtgttaatttagcgtttatttaaggcgtaatatcttctataaataacccgcaaaatatcgtcgtagctgcactcgatatttttaaaatcctgtatcaagtgctgaaaatcatttcatcgccacttccaattcctttctgcatggtaagtagtgaggacgaaaagaagaatatgataaatattgattcgtggtaatcagagagagtcgcgacatttgtgatgttattcttacaactgtaagaagcgccggtgatttacaagcaagggtatgattacgctttttaaagcgtaccataaaacataacataataaatgatttgtgatgacacgggattattgcggtttactttgaggaatataaaatgcgagtttatagcaccgcgagcgccaaataattttatgaccacaacctgtcgtattgtggtcataaaaaattgtcggctggagggagttaaatcctttacctcaatatactgcctgtcagcattagttcacaaacagtgcttcgctatcgacgatgattccatcttccgcacctttaagcgccaggtttgcctcgtagtattgctttttatcaagcagtttctgcgcatcagcaagtgcattacgagtctgtttaagtggcatcagatattggttttccattacgccaacaccggccaggcgaagctcttccattgcgccctttttatcccctttcgccattttttcattggcaatttttatcgcggcttctttttcgggagttgctacataactctcagaaattccgacagatgcattaatgacaatatattggtcatcattgagattggtctttttacctggcttagcgaactttgcccattcggtactgtcatcactcagcaaagcggaagcttcattggtcagttcttttgccttttctggatcgccatgaaacagagccaggcgcgctacctgcacgtcacgcatcgcatataaaccttgttcagagatacgctctgctgccgctgccgttttctgggtttgctgaacttgctgagtttgctgttgtgccgctaccggagcattatcagcagcccatacagtactagatgccagaattgctgtgaccatcgtggccataattaaacgtttcatacttacctcattctttaacagttttagaaaacgccgccatcatattgggtgagcatgaaatgagaaatcagagagcaacggtcattttgaaagggttatcttacagttgtagttattatcgcaagaagtattttagtcttacaattgtaggaatatgcttcctgtcgcagagaactattcttatataccacaaagagatgtcatttattatatcgatgtaaatactgattaattaaatgtaaatacagccataacatcgtaggttctcagtgaaccattttcaggataactttctatgaaagtaaacttaatacttttcagcttatttttattggtctctattatggcatgcaatgtttttgcattttccattagcggtggtggaagtgagaggagctataaagagactgaaaaaacaagtgcgatgacgaccacacactctacaaaacttcagccaagtcaggcgattttgtttaagatgagagaagatgcgccaccattaaacctcacagaagaaatgccgcccccttttccgacaaaggcgaattatcttattcatcctgtgcgataacgtctttcacatggcaggtgaacaatcatgtctgatgctgatgtgaacacctgcccaaatgagccatcctgacccattaccgcctgccataccccaccataaagcgaatcatcaagccacaagccggggcaagaaacataaatatccccgtcactagttcattaccgccagttaaccacatggtgaagtaataaatgagtgcagcgaggatcaccatgccgaagaaagaagagaccgcgcttaccacgttcagtacctgaccgatgtagccgcttacgcagacaatacacagggcgagaaacatccataaattaatcatagctcaacctcctgccgcgctaaaaaacctgtaacttcagtcactttaatagtaagacaatccttaacctctggcaatttttgctaagcatcaatgaaaacagcatgttaaatgcaagactgttgtgtacggaaaaatatttactttgcacgattaataatcagtagctgaaagcagtcagcgagtgataaagtacagataccgcattcatgctcctcgtggttatgtcctgactagtctttacactctttacaggaaccattgtcgtacatgatggcccaaccaattgagtgtaccgctgtcgacatggaatcttctgcgatacaacaattcgtatctacagaaggtaactatgtttccacaatgcaaattttcccgcgagtttctacatcctcgctactggctcacatggtttgggcttggtgtactctggctttgggtacagcttccttatcctgttctctgctttctcggcacgcgtattggcgcaatggcgcgaccattcctgaaacgtcgtgaatctatcgcccgtaaaaacctggaactttgtttcccgcagcattctgcggaagaacgcgagaagatgattgccgaaaactttcgtagtctcggcatggcgctggtagaaaccggcatggcatggttctggcccgacagtcgcgtacgtaaatggtttgatgttgaagggttggataaccttaaacgcgcacaaatgcaaaatcgcggcgtaatggttgtcggcgtccattttatgagcctggaactgggcggccgcgtgatgggactgtgccaaccaatgatggctacctatcgtccacataataatcagctgatggaatgggtgcagacccgtgggcgcatgcgctctaacaaagcgatgatcggcagaaataatctgcgcggcattgtcggtgcactgaagaaaggtgaagcggtatggtttgctcccgatcaggattatggtcgtaaaggcagctccttcgcgccgttctttgcggtggaaaatgtcgccacaaccaatggcacctatgttctctcccgtctctctggcgcagccatgttgaccgtaacgatggtaagaaaagcggattacagcggatatcgtttgttcatcaccccagagatggaaggctacccgacagatgaaaatcaagccgctgcctatatgaacaagattatcgagaaagagatcatgcgcgcaccggagcagtacctctggatccaccgtcgctttaaaacgcgcccggtgggagaaagcagcttgtacatttaacaaactgctcttactctttccctcctcaaatcggccataataacctcatggtttttatggcttttttcttaaggttttttccttcgctgaatatctaattattaccgtcagaaattaaactgtcgccgatatgagacacttgtaagttactaaaagtaaataagaaaatgcctcttgtctcgtttcagttttaggcgtacattagcgccgtctcgagcagtttagctcagaattctggggtgatgcccacggtaaaatacagggcttttaaggtcgctttgcccggtgtcaactcactgtatcaggtgtaatgaagtcattcaggcgtaacagtaattacgcggagagatgtaaagtgaaatatttctttatgggcatttcttttatggtcatcgtttgggccggtacttttgccctgatgatctaaaagcaaactgtgcaatgaaaaacaggagccatcaggctcctgtttgcatttctgacgacggtgtttattccgcgttttcgtgaatatgtttgctgctggcgggtagtaaaccgtcggcacggaacatcgctttaatccctctgatggcctgacgaatacggtcgcggttttcaatcagtgcaaagcgaacatgcgtatcaccatagtcgccaaagccaatccccgggctgacacaaaccttcgcttcgttaaggagcttcttggcaaattccaggcttcccatggccgcatatggttccgggattttcgcccagacatacatgctagccttcggcatttcaaccatccagcccgcttcatgcagccctttaaccaatacatcacggcggcgtttgtactgttcggcaatgtcgcgcacgcactgttgatcgccctccagcgccgcaatcgccgccacctgcaacggcgtaaaggtgccgtaatcgtgatagcttttaatacgagccagggcgctgaccagcgttttgttgccaaccataaagccgatacgccagcccgccatgttgtagcttttgctcagcgtaaagaactcgactgccacatcgcgtgcacccggtacctgcataatactcggcgctttccagccatcgtagacgatatcggcataggccaggtcatggaccaccagcacatcgtagcgtttcgccagcgccactactttttcgaagaactccagttccacgcattgcgcggttgggttactcgggaagccgaggatcatcatcttcggtttcggataactttcacgaatggctcgctccagttcgttgaagaaatcgacaccttccaccagcggcacactgcgtacctgcgccccggcaatcaccgcgccataaatatggatcgggtaacttggattcggcaccagcaccgtgtcaccatgatccagcgtcgccagcatcagatgcgccaggccctctttgctaccaatagtgacgatggcttcactttccgggtcgatttcaacgtcgtagcgatcctgataccagcgggaaatggcgcgacgtaaccgcggaatgccgcgactagtggagtaaccatgcgtgtccgggcgctgggccacagtacataatttttcgacgatatgcggcggagtcgcaccgtccgggttacccatgctgaaatcgataatatcttcgccgcgccgacgcgcagccattttcagttcagcggtgatgttaaaaacgtagggcgggagacgatcaatgcgcgtaaagcgacgttcagggcgagtgtcagccataatttcctcagattaacgttagcgcccggaccgtccgagcgacgctgccacgatggtggctgttttgaaaatagcctgattaatttctgtctgtccagtgttttagaacattttatcaatgacgttaaatgaggaactctgctttaaaaacaggaaatttatctgcgctaacaagaaaattaccactcattctattaacataataatttcaataaatttactaaccagaagtgcattatcaagagatgcattgctaatacaccatttatctatcaatccccttttaaaattgtggtttttcctcaaaaacggcctgctggtcatcagccttcaggttacctatcatagaggtttaatccttattcagagtcacccgtgcacgaaatattcaacatgctgctggcggtcttcgatcgggcagcgttaatgcttatctgcctgttctttctcatccgtatccgcctgtttcgcgaactgttgcacaagagcgcgcactccccaaaagaattgctcgccgttaccgccattttcagcctgttcgccctgttcagcacctggtccggcgttcccgtagaaggcagcctggtgaacgtacgtattatcgcggtgatgtccggcgggattctgtttggcccgtgggtaggcatcattaccggcgtgattgcgggtattcaccggtatttaattgatatcggcggcgtgacggcgatcccctgctttatcaccagcattctggcgggttgtataagcggctggatcaacctgaaaatccccaaagcacagcgctggcgcgtcggtattctcggcggcatgttgtgtgagacgttgaccatgattctggtaattgtctgggcaccaactaccgcgttggggatcgatatcgtctctaaaatcggcattccaatgatcctcggtagcgtctgtatcggctttattgtgcttctggtgcaaagcgttgagggcgaaaaagaggccagcgccgcgcggcaggccaagctggcgctggatatcgccaacaaaacgctaccgctgtttcgccatgtcaatagcgagagtttacgcaaggtctgcgaaattatccgcgatgacattcacgccgatgcggtggcgattactaataccgatcatgtgctggcctatgttggcgtgggtgaacataactatcagaatggcgatgacttcattagcccgactacccgtcaggcgatgaattacggaaaaatcatcattaaaaacaatgatgaagcccaccgcacaccagagattcattccatgctggtgatcccattgtgggagaaaggggtcgtgaccggaacgctgaaaatttactactgccacgcgcatcagatcaccagcagtttacaggaaatggcggtcggtctgagccaaatcatctccacgcaactggaggttagtcgcgccgagcagctacgtgaaatggcaaataaggcagagcttcgcgccctgcaaagcaaaattaatccccattttctgtttaacgctctgaacgctattagtagcagtatccgtctgaatccggataccgctcgccagttgatctttaatctgagccgttatctgcgctataacattgaattaaaagacgatgagcaaatcgatatcaaaaaagagctgtatcaaattaaagactatattgccattgagcaggcccgctttggtgacaagctgacggttatctatgatattgatgaagaggtgaattgctgcattcccagcctgctgatccagccgttggtggagaacgccattgtccacggtattcagccttgcaaaggtaaaggcgttgtcaccatcagcgttgcagagtgcggaaatcgggtacgcattgcggtgcgagataccgggcacggcatcgatccaaaggtgattgagcgggtcgaagcgaatgaaatgccgggcaataaaattggcctgctgaatgtccatcatcgcgtgaagttattgtatggcgaggggctgcatatccgccgcctggagccggggacggaaattgcgttttacattcctaaccaacgcaccccagtcgccagtcaggctacgttattgctttgagccggagtgatattgtgaaagtcatcattgttgaagacgaattcctggcacaacaggaactgagctggctaattaaagagcacagccagatggagattgtcggcacctttgacgacggtctggacgtgttgaagtttttgcagcataaccgcgtcgacgccatttttctggatatcaatattccgagcctggatggcgtgttgctggcgcaaaacatcagccagttcgcccataaaccgtttattgtgttcatcaccgcgtggaaagaacatgcggtagaagcgtttgaactggaggcgtttgactacattctcaaaccgtatcaggagagtcgtattaccgggatgctgcaaaaactggaagcggcctggcaacaacagcagaccagcagtacgcctgccgcgacggtaacgcgtgagaatgacaccattaatctggtgaaagatgagcgaataatcgtcacgccaattaacgatatctattacgccgaagcgcacgagaaaatgacctttgtctatacgcggcgtgaatcctacgtaatgccgatgaacattaccgaattttgcagcaaactgccgccgagccattttttccgctgccatcgcagtttttgtgtcaatctgaacaaaatacgcgaaatcgaaccgtggtttaataacacctacattctgcgactgaaagatctggattttgaagtgccggtcagccgcagcaaagtgaaagaatttcgccagttaatgcatctttaatcgggaactttcatgaaagcaccaggcttgcccgccgatcaacaatttttcgccgatctgttcagcggcctggtgcttaacccgcaactactggggcgcgtctggtttgccagccagcctgccagcttgccggtgggcagtttatgtattgattttccccgtctggatatcgtgctgcgcggcgaatacggcaatctgctggaagcaaagcagcaacgtttggtggaaggagaaatgctgtttattccggcgcgcgcggctaatttaccggtcaacaacaaaccggtgatgctgttaagcctggtgttcgctccgacctggcttgggttaagcttttacgatagccgcaccacgagcttgttgcatcctgctcgccagatccagcttcccagcctgcaacgcggtgaaggtgaagcgatgcttaccgccctcacccatcttagccgtagcccgctggagcaaaatatcattcagccgctggtgttaagtttgctgcatctttgccgtagcgtggtgaatatgccgccgggcaatagccagccgcgcggcgattttctctatcacagcatttgtaactgggttcaggataattatgcccagccgctcacccgcgagagcgtggcgcagttttttaatatcacgcccaatcatctgagtaaactgtttgctcagcatggaacgatgcgttttatcgagtatgtgcgttgggtgcgaatggcgaaggcgaggatgattttgcagaaatatcatctgagtattcatgaagtggcacagcgttgcggttttccggatagcgactatttttgtcgcgttttccggcgtcagtttggtctgacgccgggagagtacagcgcccgttttcagggctaacgtcagaaggttaattctgtttccagcagcgtcaggatactttgtgcatcttgcgcggcaaacaagctctggcggaagtttttattcaccagtttacgcgccagctggctgaagactttcacatgattcatcccttcgttagcacccagcgtcagcatgatcaccagttcgacttcgcccatttcactctgccagccaatcggtttcgccagccgggcaatgctgatactggaatgacggatccactgagatttggtgtgcgggatcgctacgccaaaaccaacgccggtggtaacaatctcttcccgctgccagacatcttcttccagctcaaacggatgttcagtgcgcccgttaacgccgaggttgccgcacaggaactggatcgcctgctctttattgctaaaatcctgatcaacaaagatattctccagcgccagcagtgggcgaacgtcttcttccggcgtaaaggcggtgagtaacgcttcaatttcctgcgcactgcggcattcacatgcctgacgcgccagttcccgacacgcctcgctatccagttgacgaagctggcttttcaccgccggaatacgcgggctactcatactcagctcatccaggcccagcccaagcagtagcggcagataacggctttcaccgcccagttcaccgcaaatgcctacccatttgccccgctgatgcgcagtggtaactatttgctgcaacatgcgcaggaagcttggcgtaatcgggttatatagcgggcttacgcgcgggttattacgatcgaccgcatacagatactgggtcatatcgttggagccgatactgaagaaatcgacctcatcgcagaagtggtcgatgatgtagcacacgctcggaacttccaccatgatcccaagcgtaatcgtctctgcatgacgcaggccatcgcgcttaagctcaacgatcgctttttggatctcgcctttcacccataagatctgatcgaggctgtgaaccatcgggatcatcaactgggcgttgccgaaactggcggcgcgcaaaatggcccgcagttgagtgcggaacaggccagcaaattccgggtaaatacgtaccgcgcgatagccgaggaacgggttctcttcctggggaatattcagataaggaatgcttttatcgccgccgatgtccatcgtgcggaagataatcggcttgtcgcccgccgccagtagcacctgctggtaggcttcaaattgctcctgctcgtccggcgcgctgtcgcgatccatatagagcatttcggtacggaacagcccgacaccttccgcgccgttggcaaacgcgcctggcgcttccagagcggtgccgatattcgccgcaatatcaatacgcttgttatcacgggaataggccagctgcgcggcagcctgcgcctgttgtttttggcgtttatccgccagcgtctgcgcgacctgataataaccgctcaccgcgtcattcgggttaatcgccagcacgccgcactgggcgtcaagcactgcaggttgcccggcataacgggcaatcgcatccagcggcaagccactcagtaccgggatcgcgctggcacgggccagaatcagtgtatggctggtgcgcccggttttctccagaatcatgcccgcaagatttttcaaatcaaggctcaaaaactggcttggggttaaatcttcagccaccagaatggtcggtttttcaagcaccagcttgttgcgcggcttcagttccggccaggtgatatgcagcaactgttcgctgatatcgcgaatgtcgctaacacgttcgcgcagataatcgctggcagaggcagaaagtttggcgcaaacctgctccatattgctgatgatcgccgcccccagcccctgatgctgttctgtcatcaggcgacggatattgcctgcaaattcatcatcctgaatcaggctcaaatgggcgctgaggatagttttgctttcgccgtcacgctcacgcaattgctggttcagttgctcggcaagcgttgccaggctgtgctccagccgggtggaatcttgcgcactggcggggattgcccgataactgtcgaggctgtcgctttgtaacagggtcagcgtacccacgccgacgccgcttgccagcacattgccgtacagtaaatccgggttaaggcggcttaaactacgcggcagcggatgcgccgtcagttctgcctgcgtaggctgaacgctgtcgctgtcgataaagcgcacctggatgtactcttccagcacgcgccgcgcctgctcttcatcgctgccgctaatgttcaggctgcaactgtcattaaatagggtgccggtgccaatcagcgccaggctgcttttcgcatctgcctttgcgttctggcgatggttaataaaagtgatttcgctttgccactggctgcactgttctttaagttcccacgccggacgagcatgtagaccgttaggcaaaggacagagaaattgaatcgttaacataaccgctccgggttaatcaggagatcatctgaaatccgtcagttgaacaaccgtctcacgcgtaagacgttgaataagggcagataaaagttgctgcatctgcaaaatgtcgcggcaatcggcaatgcttgcggcgcaatgtccatggcgggttgctggccccatcaccactgtgggcacgccggtgccggttaagtgcaccgccccgccgtccgtgccgccgttgctgaacatatctgcctgcaacggcacgccaatttctgccgccacggtttcgacccaggcggtaagttttggcggcgcaatcaggctcttgtcgcttaacaccagcatcggcccgttaccaatctggcgatggttagccgcgccataatcaaagtttttcgcccagcaggcggtatcaagcacaatggcgacgtccgggctcaccgcgcgggtggcagtttgcccgccgcgtaatcccacctcttcgctggaacttgccaccagccacacttccgcaggtagttcggcgtcgtgcagttcgcgcagtaacgtcaccagcagatagcaaccgaggcggtcatcaaaggctttccccatcactcgctggtgagggagaacctgaaaagtggtatcaaacgtgacgcgatcgccgggacgaattcccgcctgcatcacttcgtcataggagcgcgcaccaatgtccacgcgcatggcgctgacgtcattcccctgccggtcgccgtcaagcaggcctggaattttgcactcttcacgggtggtgatgcgcaccggctgcagctggcgggcagccatgcgtacgttgccaaccggcagcacatcaatcgccccttcgcgggagatgctgcgcaccataaatcccacttcgtccatatgcgcacagatcatcaccttcggacctgtgctttcattcaggcggatcagcacgcttcccagaccatcaaatcgcacttctttttgcaggcgatccgcttcttccagcaggatctgccgcacttcctgttcgctggaggcgatcgcatctgcctcgctcaacgcttttaataggcttaaatccattatgcctctcccgtgagcaacactgttttcggcatggcgtagagcacttctgcgccttgcggggtaaccagcacaacatcttcgatgcgcacgcccccttgccctggcaaataaatccccggctccacggtcagtaacatgcctggctgtagcgtcgtggtgtcccgcggactaaaacgcggatcttcatgaacttcaatgccgatagcgtgaccggtgttatgaccgaaatagtcgccataacctgcttctgtaatgacccggcgcgcggcatcgtcaacctgctggcagcgcacgccggggcgaatcgcggagattgctgcgagctgtgcctgcaggacaatttgatagacgttaaacagcaggtgagattcggcgctcaccccttcgccattcaccagcaaggtgcgcgtcatatcagagcagtagccctgatacagcgcaccgaaatcgagagtgacaaactcgcccgctgcaacaatcttgtcgctggctttgccgtgcggcagcgccccacgccagccactggcgacaatggtgtcaaaagaggctttttctgcgccctgctggcgcataaaccactccagttcagcggctatctcgcgctcgctcatccccgcctgaataaagcggcgaatatgctctgcaccgcgatcagcaatcccacaggcgaggcggattttctccacctcctctggcgttttgatttgccgcagcacatccggcgtggcgctaaccagtttcgcattgagttcagactgccagcggtgcgcggtttcccaactcacctgctggccctcaaaaccgagcgtttgcaactgttcatcggcaatgatttgattgacgatagtggtaagcgtgttcgtcgcgtcaagcaaatgcagctggtagccttgcgcacgggcttccacctcaacgtaatagcggctatccaccagaatgtgcgcactttcacggctaatcaccacataaccacttccggtggagatccccagatgcggctgtttgttctgccgactggagagaagcactgcatccagttgttgcgccttaagccagtcgcgcaggctagcgagtaatgtcatctggattttccttcttacaggctatcgattaacaatttgcctttacggaacatcatcagacgcaggaacaccaccatcagcgcagttatgactgcccccagcgcgatccccgccatatagacgcccaggttagtgaccagcggccatgcccagatagcggactccgggaaccattgcactgcgcccagccagacagcggcggtactgccgacaatagcgccgaccatatagctcggaatggcggtgatagggctttccagcgcaaacggaatcgcaccctcactgatccccataaacgccaggaacatggcggtcttaccctgcggataaagttgagcgttgaacaggcgtttgccggttaaacgacggtcgataatggtcgccagccccagaccaatcggcggaataacgatagcgatagaacgagcggtgaccggtaatacgtggtcagtggtaaagctgaaggcaacaaaacctgcggctttgttgatcgggccaccaaggtcgattgctgtcgccgcggcgatccccattgcgtacatcagcgcgcccttctcacctgcggcagtcagcacagtacggataccgccgttgatccagccaccaaagggggtgatgacgtagtacatcgccagcatgacaaaaatggcggaaagaatcgggagcaaaaatgtggttttgaacgctaacaggaaatccggtaactggattttctggttcatccacttcacaaggtaaccggcaacgatagaaataatcagcgcaccaatgaaggtggacggcaccgggctagaggtcgcccattgcatagtgctgggatcgaagttcagcagttgcgtcggctgggtagacatcaacccgccgataaaaccagccgggaacgccagtttgccaccgatagagttcgccacaaaagcagcaaacatcggaatggcaaaaccaaacaacacgccgccgaaggactggctcagccaggcaaatttaagtaaggagaggtcgaaaccggagaatttcccgctattaagagcatccatgatgccgatctcagcaggaattttaagccagctataagcaatcagctggctgaaagcgaggatcacaccgcccataattaaggtcggcaccatgcgactaatcccactcatcacatgctgcgggagttcaccccagaagctggttttagaggcctgcggattcttaactgccgctgccgcaccggatgcgccaggcacaacggttgcactgcgttttttaatggccataacaattatccctgtcgaatattactgttgttcagaggcaatcatctcttcgatttctttgatgatgcccgcagcgtttttaattgcgtcctgcaaagtgatttcataaacgtcgcgactttcgaaacgttcgttatcttccggggtaactgccacggagtggatgatgatggtcgcttcggcgatatcctgcgccgtcaggcgattctggataccgtccgcgccctgggtttcaattttcacttcataaccggcttctaccgccgcttcttccagcgcctgagcggccataaaggtgtgagccaggcccatcgggcaggcacataaggcaatcagtttcttactcatcgttaattcctcgttcagtgatagttgacgagtgaaattatgaacgtgcaaaacaaatcgccgttaccagacaaataatgcatttactggagaattaatcccgctgtacggaagtgtgacgcaggtcgaccttgtgaggggacacaaagaaaaattgaataaactgtatgatttaaaagattatcgggagagttacctcccgatataaaaggaaggatttacagaatgtgacctaaggtctggcgtaaatgtgcaccggaaccgagaaggcccggattgtcatggacgatgagatacaccggaatatcatggacatattctttaaagcgccctttatcttcaaatgcggcacggaaaccggaggctttgaagaactcaaggaagcgcggcacgataccgcccgcaataaacacgccgccaaatgtcccgagattgagcgccagattgccgccaaaacggcccataatgacgcaaaacaggctcaatgcgcggcggcaatcggtgcagctgtcagccagcgcgcgttcggtaatatcttttggcttgagattttctggcaggcggttgtcagctttcacaattgcgcgatacaaattcaccagcccagggccagaaagcacgcgctccgcgctaacatgaccaatttccgcacgcaatatttcgaggataatggcctcttcttcactattcggcgcaaaatcaacgtgaccgccttcgcctggcaagcttacccaacgcttatcgacatggaccagatgcgcaaccccaagccccgttccggcaccgtaaaccgcaataggcttaccttcgaccggttctgcgccaccaaactgaatcagatgctcttttttcagcatcgggatcgccatgcttacagcggtaaaatcgttaataatttccagatggctaaaaccgagattctttttcatttcggcaatactgaacgcccaggtatggttggtcatcgccacccagtcaccggtaattgggcaagcgatggcaatacagccgtctttcacctcgaccttatgttcttcaagataaacgcgaatgaccgcttcgaggctggggtaatcaagcccactataggtcttagcctggctgatttcaccactggcaatatcacacagagcaagacgtgcgttggtgccgcccacatcaccgactaatgcatactttgtcattcttcaactgctccgctaaagtcaaaataattctttctcacactgtaaatacctgggggcataacaacaacgccggaaaggcaggctccctgtaaatatcgatctgggtcacacaattactttatcgtttcagcaccaattgcagcgatgcctttttgcaagctgggcaaactaagtatctgaccccgcataaggaatagaacacaggcggcactaacccggacgtagactgtattacaaaagcggcaaaaagcagagacaaaaaacccccgctttgcagcgagggttggaaatttggtggagctaagcgggatcgaaccgctgacctcttgcatgccatgcaagcgctctcccagctgagctatagccccacgatgcgtttacgtaccaagtttgctgggtgcaaaatttggtggagctaagcgggatcgaaccgctgacctcttgcatgccatgcaagcgctctcccagctgagctatagccccgtcacgtaaagcttgtcgagttgacgggcggcatcatatgaattccgcccgaatgtgtcaacggcaaattgcaacgtgtagtttcaatcgctgaaaaatcaggcaaatgaacaattttggaaaaccgctcgcattcagtagttattcatgtcacggtttcctgtaaagtggtgttataaaatgaactactaatagacccacatacattcagggaattgttatgttcaaggagaggatgacaccagatgaacttgccagactgaccggctatagccgccagaccattaataaatgggtacgcaaggaaggctggacaacgagtccaaaacctggcgtccagggtggcaaagcccgactggttcacgtcaatgaacaggttcgtgaatatattcgcaatgctgaacgtccagaaggtcagggagaagcgcctgccctttctggtgatgcgccgcttgaagtattgctggtgacactggcgaaagagatgacgccagttgaacaaaaacagtttacatccttgcttctgcgggaagggattatcggattgttacaacgcttagggattcgcgatagcaaataatatgaaaagattacgcaataaaatgaccaccgaagaactggctgaatgcctcggtgtggctaaacaaactgttaaccgttggatcagagaaaaaggctggaaaacggaaaaatttcccggcgtgaaaggcggtcgtgccagacttattctggtcgatacgcaagtttgcgagtttattcagaacacgccagccttccataacacaccaatgttgatggaagctgaagagagaattgctgaatacgctcctggagcacgcgccccggcgtatcgacaaatcatcaacgcgatagataatatgacagacattgagcaggaaaaagtcgcgcaatttttgagtcgtgaaggaattcgcaatttcctcgcccgtctcgatattgacgaaagtgcataaataaaaaacggcaggatattatctcctgccgtttatctttttacacgctaattactgctgattttcgcgttcagcaataaaatccagcgctttgttgatacgctcgatactgcgggtcttaccaattgcgtgaacggtaacatccagtgctggagactgccccgcaccggttacggcgacacgcagcggcataccaactttacccatacccacttccagctcatccgccgtcgcctgaatagcgtgatgaacgttttcagcggtccagtcagtaatcgcggccagtttgtcacgaaccacttccagcggctgacgcgctaccggacgcagatgttttttcgcggcgtcggcatcgaactcagcaaaatcttcgtagaaataacggcagctctgtgccatctctttcagcgtcttgcagcgttcgcccagcagtttcaccagatcagccagctgcgggccgttacgggtatcgatattttcctgctcaatgtgccactgtaagtgagtagcaacatactccggcggcagcgcgttaatgtagtgatggttcagccacagcagcttgtcggtgttgaacgcactggcagatttgctgacggcattcaaagtgaagtatttgatcatctcttcacgagtgaagatttcctgatcgccgtgggaccagcccagacgcaccagatagttcagcagtgcttctggcaaataaccgtcatcacgatactgcattacgctgactgccccgtgacgtttggacagttttttaccgtcatcgccattgatcatagaaacgtgcgcgtaaaccggcaccggcgctttcagggccttaagaatgttgatctggcgtggcgtgttgttgatatggtcttcgccacggataacgtgggtgatttccatatcccagtcatcgacaaccacacagaagttataggttggggaaccatcggtacggcggataataagatcgtccagttcctggttgctgaactcgatcggaccacggatctgatcgtcaaaaacaacagaaccttcctgcgggttagcaaaacgtacaacacacggttcatcatcagcatgatgctcatggctgtggcggcagcgaccgtcataacgcggcttctcacctttcgccatttgctcttcgcgcagcgcttccaggcgctctttagagcaatagcatttataagcagtgccctcttccagcatctgatcgatcaccgcgttgtagcgatcaaaacgtttggtctggtagtacggaccttcatcccactccaggctcagccagttcatgccatccataatggcttcgatagcttccggcgtggaacgctcaagatcggtgtcttcaatacgcagcacgaactcaccgccgtggttacgtgcaaaaagccaggagtaaagagcagtacgcgcgccgccaacgtgcagatagcctgttgggcttggcgcgaagcgagttttgattttcatgaaatggccttacgtttagaaagatgccgacaaccggcaaatcctggaaaaattaagtgggcgatattctatcactcccgcctgattcctcaatgtagttcgggtttctaccttacgcattattgttttcgttgacaaattgcgcaacacggtctgttttgcgatcatcttgcttaaatttacgacgaacgaacaatttctttagaaaatgcgttgactcattttgaactctccctataatgcgactccacacagcgggggtgattagctcagctgggagagcacctcccttacaaggagggggtcggcggttcgatcccgtcatcacccaccaactactttatgtagtctccgccgtgtagcaagaaattgagaagtgggtgattagctcagctgggagagcacctcccttacaaggagggggtcggcggttcgatcccgtcatcacccaccactttctcgccagctaaatttcttgtaaaaatgtgaagtaccgaagtgggtgattagctcagctgggagagcacctcccttacaaggagggggtcggcggttcgatcccgtcatcacccaccacttcgggtcgttagctcagttggtagagcagttgacttttaatcaattggtcgcaggttcgaatcctgcacgacccaccaatgtaaaaaagcgccctaaaggcgcttttttactatctgcgatactcaaagattcgaacctgcagcaggtttgagttgagcgcagcgaaacaacggagccgctcgtgctggcgacggcccgaagggcgagcgaagcgagtcatcctgcacgacccaccaatgtaaaaaagcgccctaaaggcgcttttttgctatctgcgatttgcgaaattgcctgatgcgcttcacttagcagactactatttccggcaattcctgtctcctcacttactgtgtcaatgcagccaacagcttaaccatcgcgggcgtcacctgctgtgtttcataaacaatatataaatctgcagggatgcgctgtttgagcggacggaaaatgacacctggccagttcatttgtgcgtagctgtccgctatcaatgtgataccaatgcccatactgaccatagcgagtaccgtttgcggttcattaacttcgcgaataacaaccggactaaatcccacctgctggcaaactcgctgcaaaaaatcccagtcagtgtaaacgggcggcattgtaacaaaatactcgtcacgtagcgcttccagcgggacggtggaaaaactactgagatgatgctcttcaggcatcgccaccagaaacgcgctttcatgcaaccgtaagctggtaaaaccagtcggtggttctgtcgccattcgccagatcccggcatcaagttcgcggcgttccagcaaggccatttgcatcgcgggcatcttttcgcgaaaaagaacgtcaacgttaggattttccctgaggaatcgccgcataaccgggcgcatccgtccccacattgccgttcccactacgccgagttcaatccgccctgcttctccccgacctatttgttcaatccgagccaatacattattagcattcaccagcaatcgacggctttcttccatcaagattttgcccgcgtgtgtcagtacgacgctgcggctatggcgaataaaaagctgcgtgccgagttgattttccagctctttaatatgaatgctgagcggaggctgagacatatttaaacgcgctgctgcgcggccaaaatgcaactcttccgctacggcaagaaaataacggagcaacttaagatctgttctgtatacgcgttccataattaagtgctccatataataaatacatcgtattaaattatcatggcataaagtatttcaccaccagatatccgacatacataaacacaatggataatatacccggtaatacatttggtacaggaataggcaagcgcacgattgtaaacaaagcaccaataccaaaaccaacgccggaagaaaataaaatatctttcactaattaacctttatcataaaagcagctctgaagagcagagccgcgaatccttttaatgagtcaccgctcgatgctttatcttttcagggtcatgattatatttaaacccaaagaaaaatatcactgcgagaaaaagagcatatcctgcaaacaccagccagatagtttgccagtcttttacgccatccacgctaaagtaatctactgccatgccactcagaatgctgccaacccatgcgccgacaccatttaccatggtcataaagagcccctgcgcgctggcacgaatgctggaatcaacttcctgttcgacaaatacgctaccagaaatattgaagaaatcgaatgcacagccataaacaatcatgctcagcagcagcaaaataaatccggttgtactcggatcgccataggcgaagaagccaaagcgcagcgtccaggccaccatactcatcagcatgacggttttaatgccaaatcgctttaaaaagaatgggatagtcagtataaagcccacttctgccatctgactaacactcagtaaaatggagggatatttcaccacaaaactgtcagcaaactccgggttacgggcgaaatcatgtaggaacggattaccaaaaacgttggtaatttgcagtaccgcacccagcatcatggcaaagaggaaaaagatggccatgcgtggatttttaaacagcacgaaggcatccagacccagcttgctggcaaggcttgtggtcgcttttttctccgcaaccggaatcttcggcaaagtcagcgcataagcgctcagcagcaaactcgcaccggacgcgatatacagctgcagactactcaattccagatgcagcaggcttactgcccacatcgcgacaatgaaccccaccgtaccaaaaacgcgaatgggcgggaaagcggtcaccgggtcaagccctgcctgggcaagacaggaataagagacgctgttgcttaacgcaatagtcggcataaacgccatcgcattgactaacatcacccaaaacatcatatccggatcagttacggatgccgcataaaaaagtacgcccgcacacaccaggtgacacagcatgtatgcacgttctgcgcgcagccatttgtctgcgatgatccccattataccaggcataataatcgcggcgatccctttggaactgtaaaccatgccaacattagcgccggtgaaatgaagagtattaatcatgtaagagccgagggtaaccagccagctcccccagataaaatattgcaaaaaggacattacctttaagcgcatcgcgatgctcataatcgtttccttgtcgcatcatttggcctcacccgcgaggccgtttcttattgtttttctcaggcaattttgcgcagaaagccacaaataaggttgatgaagttctgcttagagagctccgcagccgccagcgtttgcgcatgactcaatttcacatcgcttaaaccttccgccatattggtaatcgcagagaccgcaacgactttaaggtcgcaatggcgagcactaataacctcaggcaccacagacataccaacaacatccccaccaataatttgcatcatgcgaatttccgccgcagtctcgaaattcggccccggatagctgacgaacacgccctccgtcagagggaaaccctcctctttcgccactttttgtaacagtgcgcggtattccgcatcgtaggcatttgccagactgaagaagcgctctccaaaacgatcatcgttaagacccaccatcggcgtaccgggcatggtgttgatatgatctttcaatgcgaccaggctgcctgcccccacttccggacgcaggctgcctgccgcattggtgcagaacagtagctcgcagcccagcagcttaaaggtacgaattgcgtcagtcataatggtcattccacgaccttcgtagaaatgtccgcgacctttcatacataccaccggtacgccctggagatggcccagcactaactcccccgcatgaccatgtaccgtacttaccgggaagcccggcagcttttcgtaggaaattgcgacagcgttctcaatctgatcggccagcgcgccgagcccggaacctaaaataaaggccactcgtggcgtgaaatcaggtttataagtcttgataatatctatgcaaaacagcgggttatgagaaaattgaacctgagacatacatatcctttttctgtagggtggaatctaacgcctttttatagcgaggttgtcccggctcttaccaatacacttttctcacgcattcaatagcgattcgatatcgatggatttatatcttttttctattaatccacggtaaaaactgtattggcgatattaattcctttgcattaacaatatgtcgtttttagcaaaccactttattaagcaatctactaataacgatcggcatagggaattatgctatgaaaaaacatcttttaactctgacactttcctctatattagcgatacctgttgtatctcatgcagaatttaaaggcggttttgcagatatcggcgtgcattatctggactggaccagccggactaccgaaaaaagcagcaccaaaagtcacaaagatgattttggttatcttgaatttgaaggtggcgctaactttagttggggagaaatgtacgggttcttcgactgggaaaacttctataacggtcgccataataaaccaggtagcgagcagcgttatacctttaaaaataccaaccgtatttacctgggtgacaccggatttaatctctacttgcatgcgtatggcacctacggttctgcgaatcgcgtgaatttccacgacgatatgttcctgtacggtatcggctacaatttcaccggcagcggttggtggttcaaaccgttctttgctaagcgttatacagatcaaacctattacactggcgacaacggctatgtcgccggctgggttgcaggttacaactttatgctgggcagcgagaaattcactcttaccaactggaacgagtacgagtttgaccgtgacgctacctatgcagcgggtaatggcggtaaagaagggctgaatggcgcagttgcactgtggtggaatgcaacaagtcacattactacggggattcagtatcgatatgcggatgacaaactgggcgaagatttttaccaggatgcgataatctactccatcaaatttaacttctgattgattactgccggggctcccggcagtatgaattcactttatatctgatacaacggatccccttcccgcccagccattagcgcattgccctggtctcgtaccacgtcccataaagcttcagcggcggtggaaagactacggttcttcctgcgcaccagcatcaactggcgttcaacaaccggcgtaatgcgctttaccaccagtgggctaccttcaggcaatggtagcgccagtgcgggaagaatactgatgccgatgcctgcggctaccatcgggaacagcgtcgccggatgtccaatctcctgcacaatattcgcctgaataccattgcgcgccagcgctgcgtcaatcagcggtcggctgccactcgcgtaatcctgcaacaccaatttcgctccctgtaatgcctgccagggtacataatcttccacggccaaagcgctatcgcgatggcaaagcagaaagaaaggctcggaaagaatcgcttcacattgcagatcgcccactgggcctggatcgatgacgatgccaaaatcgacatctccctggcgaatactttccattacccactgctgcggacgatcgtgcaggacaaactgaatatctggatagcggcgatggctttcagcaatgcattgcggaataagatgcgcggaaatggtctggctggcagcgacccgaacttttccgctcagttgttgccccatacgcccggtatcgcgcaacgtgctgttcagttcatccagcagtcgctcaagacgcaaagccagctgctgccctgcatctgtaagcaccacttcacgcgtggttctgtccagcaggcgaacaccagtatgattttccagttccttcacactgtgactcactgcgctctggctcaggccgatacgctctcctgcacgactaaaacttttctcctgcgctactgtgacgaaaacctttaattgttttaaagaataattcatctgttttcttcatgaatggatgcaataaatcaattttatttctcaaactggaagaagcacaatagaaccatcgatcatctggagtctttatgaaactttttcgtatcctcgatcctttcaccttaaccctgatcacggtggtgttgctggcctctttctttccggccagaggcgatttcgtccccttctttgaaaatctgaccaccgcagctattgccctgctgttctttatgcacggcgcgaagttgagccgtgaggcgattattgctggcggtggtcactggcgactgcatttgtgggtaatgtgcagcaccttcgtgctgtttccgattctgggtgtactgtttgcctggtggaaaccggtaaatgtcgacccgatgctctactccggttttctctacttgtgcattctcccggctaccgtgcagtctgcaatcgccttcacgagtatggcgggcggtaacgtcgcggcagcggtttgttctgcgagcgcatccagcctgctggggattttccttagtccattgctggttggtctggtgatgaatgttcacggtgcagggggcagccttgagcaggtcggtaaaattatgctgcaactgctgctgccgtttgtgttggggcatctttcccggccgtggattggtgactgggtgagccgcaataaaaaatggattgcgaaaactgaccagacgtccattctgttggtggtttatacagcgttcagcgaagccgtcgttaatggtatctggcataaagttggctggggaagtttgctgtttatcgtggtggtcagctgcgttcttctggctatcgtgattgtagttaacgtctttatggcacgccgactgagcttcaataaggcagatgaaattactatcgtcttttgtggtagcaaaaagagtctggcaaatggcatcccgatggcaaacattctgttccccacaagcgtgatcggtatgatggtgctgcccctgatgattttccatcagatccaattgatggtctgtgcggtgctggcgcgtcgatacaaacgccagaccgaacagttacaggcgcagcaggaaagcagcgccgataaagcttaaagcggacgcttcaggggctggaccagttgcgtcagcccctcggttttaatcagcagcgtgatttgcattagctcaccgagcttccctgccgggaactcatctttgcgggcaaaccacagcagatactcctccggcaggtcgattaagcgacgccctttgtatttgccaaacggcattatcgtattggctatttcaatcagctgctctttttccatctcagctacccagcaaacgcagcatttccgcttcgtcgatgacttcaatgcccagttcctgcgccttcgccagtttagatcctgcagcttcacccgctatcaccagatcggttttcttgctcacgctgcccgcgactttcgcgcccagttcgaccagtcgagctttagcgtcatcacggctcatctggcttaagctgcccgtaagcaccacggttttaccagcaaacgggctgtcaatctcttccgcgttgataacgatcggcgcaggccagtgaacaccttccgccaacagctcgctgatgacattgcggttgctttcttcggcaaagaagttgtgaacgtgggatgcaacgacaatgccaacatcaggcaccttttgcagctcttcaatgctagcggcttccagcgcttccagcgtgccgaaatatgccgccagacctgctgcggtggcctcgccgacttcacggatgccaagtgcatagaggaagcgagcaaaggtggtttctttcgctttttccagcgcgttaaccacgttttgtgcgctttttggccccatacgctccagtccggtcagtttgcctgcggtgagtttgaacagatctgccggagtatggacatattctttttcaaccagctgatcgatgattttgtcgcccattccgtcaacatccatcgcacggcgggaaacaaagtgtttcaggctctctttacgctgcgcaccgcaaatcaggccaccggtacagcgggcaaccgcttcaccttccacacgctcaacgtcagaaccacataccggacaatgcgtcgggaatacaacctcacgggtatcttccgggcgttcagaaagcacgacgttaaccacctgcgggatcacgtcgccagcgcggcgaatcaccactttatcgccaatgcgtaaaccaagacgttcgatttcatccgcattgtgtaaggttgcgttactcaccagcacgcctgcaacatggacaggttccagacgcgcaacaggcgtaatcgcgccagtacgcccaacctgaaactcgacgtcacgcacaaaggtcatctgctcctgcgccgggaatttaaacgctaccgcccagcgcggggcacgcgcgacaaagccaagctgctcctgctgtgccagactgttgaccttaatcaccacgccgtcgatatcaaagcccagcgtcgggcggtcttcttccactttgtgatagaacgccagcacttcttccgcgctttcacaaagcgttacccgatcgctgaccggcaacccccactttttaaattgcagtaaacggccaagatgagtatccggcagctcgccaccttccagaacaccaacgccatagcagaaaaaagtgagcggtcgcttcgctgtaatacgcggatcaagctgacgcagactaccagctgccgcattacgtgggttagcaaacactttcccgcccgtgcgtcgcgcatcttcgttaatcttttcgaaccccgcctgcggcaggaacacttcaccacgcacttccagacgcgccgggatattctctccgtgcagcttcagcggaatggcgcgaatagtacgcacattagacgtgatatcttccccggtggtgccatcgccacgggtcgcggcactgactaaaacgccattttcatacagaatactgacggcaagaccatccagcttcagctcacagcaccaggtgactttctcgttgtttttcagacggtcctgcacacgtttgttgaaagcaagaaagctttcttcatcaaaaacgttatccagactcagcattggtacttcatggcgtatctggctgaaagccgccagcggcgcagcgcctacacgttgagtagggctatcaggcgtaatcagttctggatgtttggtttccagctcgcgcagttcgcgcatcagcctgtcgtattcagcgtcgggaatttccggcgcatccatcacatgataaagatattcatgatggcgaagcgtcgttcgcagttctgtcagttgttgttcgatactttccatatcgcaccatcaatgctaaaaacccccgacaagcgggggttcgaagaggagttaatttgccttaagtgtatcaggcgttggcgtctttgacttcgcggatgatgtcctggtactcgcgcaatttctgcggagtcatcatacggcgctgatcgtcaagcacgacaccgcccacttcatcggcaatatgctgcgcagattgcagcatcagcttgaagttctgcagctcgtcaccgtaagacggtacctgcataaagatagtgacacccggagtagtgaaatccttcatttcaggatcaaaggttcccggtttcaccatattcgccaggctgaataacgccgggccgctgccatccgggctaagatgacgatggtaaatattcatatcgccaaaaatgaagcccgcttgttgaatgctgttaagaagcagttcaccgtttagctcgctaccgtgatgcgccgcgacgttcatgataatcaccgcttctttgcgcttcggtttatccataactggagcaggttccgctacaggctcaggctgtggtgccgctacgggttctgcaggctggaaagcctgttgtgccggttgcggtgcactatgcacaggctgcggcgctggcgcgacctgtgggctaactggctgctgcaacggctgttcaggctgcggctgataggcaggctgctgcaccggctgcgctggatgcggagcatgttgcggcggtacctgcgcttcaggcggctgctggaccggttgacgcggctgcgcagacgcataaggcggttggtactggtgttgcgggctcggacgagcagcctcatgctcctgagcgttagccggggcatgattcacgcggtgaacacgaacctcaccaacgccctcatcatcttcgacatcctcgtcataagaatcgtcgtcacgtttactcttcattcgttttaatggccgatcgcggaacatagaagatcgttctttacggctggtccagaaaccatgtaccagtaaagcgattatggcgatcgcgccaacaatgattaatatcagacgcaaatcctgcatcattatattctctgttgttctaacaccttgccaccacggcaaacatttactcactaagagtatttgccgattacctcaagtgcaagtgcactattaactttcacagcacaaagatagatgaaatcgtgctttttgctgttttttcgaacatatcctaactgtccattgcgcaattacccggtaaaatacgcagaattttcctgggattggtcaaaaggagctcatcctgattatggttagtagtttcacatctgccccacgcagcggtttttactattttgcgcaaggctggaagctcgtcagccaacctgggattcggcgtttcgttattttaccgctgctggtcaatattttgttgatggggggcgcattctggtggctctttacacagctcgatgtctggatcccgactctcatgagttacgttccggactggctacaatggctgagttatctgttgtggcctctggctgtcatctctgtgctgttagtgtttggctatttcttctccacgattgctaactggattgccgctccgtttaacggtttattggctgaacaactggaagcacgattgactggcgctacaccgccagataccgggattttcggtatcatgaaagatgtgccgcgaatcatgaaacgcgaatggcaaaaatttgcctggtatctgccgcgcgcaattgtattactaattctttacttcatccctggtattgggcaaaccgtcgcgccggtactgtggttcctgtttagcgcctggatgttagccatccagtattgcgattaccccttcgataaccacaaagtgccgtttaaagagatgcgcaccgccctgcgcacacgcaaaatcaccaatatgcagtttggtgctttaaccagcctgtttacgatgatcccgctgcttaatctgttcatcatgcccgttgccgtttgtggcgcgacggcgatgtgggtcgattgctatcgcgataaacacgcgatgtggcggtaacaatctaccggttattttgtaaaccgtttgtgtgaaacaggggtggcttatgccgccccttattccatcttgcatgtcattatttcccttctgtatatagatatgctaaatccttacttccgcatattctctgagcgggtatgctacctgttgtatcccaatttcatacagttaaggacaggccatgagtaagatttttgaagataacagcctgactatcggtcacacgccgctggttcgcctgaatcgcatcggtaacggacgcattctggcgaaggtggaatctcgtaaccccagcttcagcgttaagtgccgtatcggtgccaacatgatttgggatgccgaaaagcgcggcgtgctgaaaccaggcgttgaactggttgaaccgaccagcggtaataccgggattgcactggcctatgtagctgccgctcgcggttacaaactcaccctgaccatgccagaaaccatgagtattgaacgccgcaagctgctgaaagcgttaggtgcaaacctggtgctgacggaaggtgctaaaggcatgaaaggcgcaatccaaaaagcagaagaaattgtcgccagcaatccagagaaatacctgctgctgcaacaattcagcaatccggcaaaccctgaaattcacgaaaagaccaccggtccggagatatgggaagataccgacggtcaggttgatgtatttattgctggcgttgggactggcggtacgctgactggcgtcagccgctacattaaaggcaccaaaggcaagaccgatcttatctctgtcgccgttgagccaaccgattctccagttatcgcccaggcgctggcaggtgaagagattaaacctggcccgcataaaattcagggtattggcgctggttttatcccggctaacctcgatctcaagctggtcgataaagtcattggcatcaccaatgaagaagcgatttctaccgcgcgtcgtctgatggaagaagaaggtattcttgcaggtatctcttctggagcagctgttgccgcggcgttgaaactacaagaagatgaaagctttaccaacaagaatattgtggttattctaccaagtagcggtgagcgttatttaagcaccgcattgtttgccgatctcttcactgagaaagaattgcaacagtaatgccagcttgttaaaaatgcgtaaaaaagcacctttttaggtgcttttttgtggcctgcttcaaactttcgcccctcctggcattgattcagcctgtcggaactggtatttaaccagactaattattttgatgcgcgaaattaatcgttacaggaaaagccaaagctgaatcgattttatgatttggttcaattcttcctttagcggcataatgtttaatgacgtacgaaacgtcagcggtcaacacccgccagcaatggactgtattgcgctcttcgtgcgtcgcgtctgttaaaaactggcgctaacaatacaggctaaagtcgaaccgccaggctagactttagttccacaacactaaacctataagttggggaaatacaatgttccagcaagaagttaccattaccgctccgaacggtctgcacacccgccctgctgcccagtttgtaaaagaagctaagggcttcacttctgaaattactgtgacttccaacggcaaaagcgccagcgcgaaaagcctgtttaaactgcagactctgggcctgactcaaggtaccgttgtgactatctccgcagaaggcgaagacgagcagaaagcggttgaacatctggttaaactgatggcggaactcgagtaatttcccgggttcttttaaaaatcagtcacaagtaaggtagggttatgattagtggcattttagcatccccgggtatcgctttcggtaaagctctgcttctgaaagaagacgaaattgtcattgaccggaaaaaaatttctgccgaccaggttgatcaggaagttgaacgttttctgagcggtcgtgccaaggcaagtgcccagctggaaacgatcaaaacgaaagctggtgaaacgttcggtgaagaaaaagaagccatctttgaagggcatattatgctgctcgaagatgaggagctggagcaggaaatcatagccctgattaaagataagcacatgacagctgacgcagctgctcatgaagttatcgaaggtcaggcttctgccctggaagagctggatgatgaatacctgaaagaacgtgcggctgacgtacgtgatatcggtaagcgcctgctgcgcaacatcctgggcctgaagattatcgacctgagcgccattcaggatgaagtcattctggttgccgctgacctgacgccgtccgaaaccgcacagctgaacctgaagaaggtgctgggtttcatcaccgacgcgggtggccgtacttcccacacctctatcatggcgcgttctctggaactacctgctatcgtgggtaccggtagcgtcacctctcaggtgaaaaatgacgactatctgattctggatgccgtaaataatcaggtttacgtcaatccaaccaacgaagttattgataaaatgcgcgctgttcaggagcaagtggcttctgaaaaagcagagcttgctaaactgaaagatctgccagctattacgctggacggtcaccaggtagaagtatgcgctaacattggtacggttcgtgacgttgaaggtgcagagcgtaacggcgctgaaggcgttggtctgtatcgtactgagttcctgttcatggaccgcgacgcactgcccactgaagaagaacagtttgctgcttacaaagcagtggctgaagcgtgtggcagccaagcggttatcgttcgtaccatggacatcggcggcgacaaagagctgccatacatgaacttcccgaaagaagagaacccgttcctcggctggcgcgctatccgtatcgcgatggatcgtagagagatcctgcgcgatcagctccgcgctatcctgcgtgccagcgctttcggtaaattgcgcattatgttcccgatgatcatctctgttgaagaagtgcgtgcactgcgcaaagagatcgaaatctacaaacaggaactgcgcgacgaaggtaaagcgtttgacgagagtattgaaatcggcgtaatggtggaaacaccggctgccgcaacaattgcacgtcatttagccaaagaagttgatttctttagtatcggcaccaatgatttaacgcagtacactctggcagttgaccgtggtaatgatatgattagtcacctttaccagccaatgagtccgtccgtgctgaacttgatcaagcaagttattgatgcttctcatgctgaaggcaaatggactggcatgtgtggtgagcttgctggcgatgaacgtgctacacttctgttgctggggatgggtctggacgaattctctatgagcgccatttctatcccgcgcattaagaagattatccgtaacacgaacttcgaagatgcgaaggtgttagcagagcaggctcttgctcaaccgacaacggacgagttaatgacgctggttaacaagttcattgaagaaaaaacaatctgctaatccacgagatgcggcccaatttactgcttaggagaagatcatgggtttgttcgataaactgaaatctctggtttccgacgacaagaaggataccggaactattgagatcattgctccgctctctggcgagatcgtcaatatcgaagacgtgccggatgtcgtttttgcggaaaaaatcgttggtgatggtattgctatcaaaccaacgggtaacaaaatggtcgcgccagtagacggcaccattggtaaaatctttgaaaccaaccacgcattctctatcgaatctgatagcggcgttgaactgttcgtccacttcggtatcgacaccgttgaactgaaaggcgaaggcttcaagcgtattgctgaagaaggtcagcgcgtgaaagttggcgatactgtcattgaatttgatctgccgctgctggaagagaaagccaagtctaccctgactccggttgttatctccaacatggacgaaatcaaagaactgatcaaactgtccggtagcgtaaccgtgggtgaaaccccggttatccgcatcaagaagtaattcttgccgcagtgaaaaatggcgcccatcggcgccatttttttatgcttccgccagcggcggcaaaatcaattcatcgctctcatgctgctgggtgtagcgcatcacttccagtacgcgcaaccccgctcggtgcactgcatcggttaacgccttccctttcagcaagccactgatgagctgagcacaaaacaggtcgccagtccctttcaggtcggtttttacccgactatgggaaatgacattcacgctgtcggcagtgaccaccacaacctgcatctcctgattttcttcattaccggaggcgctggtaaccaccacccattttaatgtgtcactaagcagactttttgcggcagcaatggcactgtcgagatcgcggcaatttttaccggtcaggatttccaactcaaagatattgggggtaattccctgcgccagcggcagtaaatattgtcgatacgcttcgggaaggtcaggtttgacataaattccgctatcaatatcgtcaatcaccggatcgaccatgatcaataggtcaggatggtctttgcgtagcgcagtcagccactcggcaaggattttgatttggcttgccgttcccatatagcccgtggttacagcacgaagttggcgcagcgcatcacgctcctgaagcgcacgcaaatagccgctaaaccattcgtccggaatcgcaccaccgtagaaagtgtcataatgcggcgtattgctcagcaataccgtcggcacggcaaagacattcaggccgttctgtttgatagcaggcacggcaatgctgttgcccacgctgccgtaaaccacctggctctgcacggcgacgatatccgcctgcagtgccctactcttatcgttaaacaacaacaaactactcatttaattttttctccttgccgatgatcctcatcgtaatccaaccgaaactttacctgattctggcagtcaaatcggctatcacaaaacaaggataaggtaattcaatgaagaaaatcatttgtctggtcattacactactaatgacactccccgtttacgcgaagttaactgcccatgaagaagcccgcatcaacgccatgctggagggattagcacagaaaaaggatttgatatttgtgcgcaacggtgatgaacatacctgctatgaagcggtttctcatctgcgtctgaagctcggcaatacccgtaaccgcattgacactgccgagcagtttattgataaggttgctagcagcagtagcattactgggaagccgtatattgtgaagatccccggtaagagcgatgagaacgcacagccttttttacatgcgttaattgcgcagacggataaaacggtgcctgcggaaggaaattaatccgctttgggaaggcatttacaggaggtaacatgaaaaaacgctttatttatcacgatgaaaaaagcaataaattttggtggatagattacgaaggggatagtttagctgtcaactatggcaaggtaggtagtattggtaaattccagacaaaagagttcgataatgaagaacagtgtctgaaagaagccagtaaattgattgccgcaaaaatgaagaaaggctatcaagaagatccaaagtttaacttcatggatcgctactattttgatgatgaagaaattgggttacatgttaaaacgagtcacccaaacttccagtgccattttactgatccactttatatgtgttgctgggatgaagaatctccttttggcagcgatgaaggtgctgatgctctaaacgttcttgaaaatagcctccgtaaagagccggatctggactgtgctgatttccctcaaatgttaattgaaactatgtggggtatgaaatacatcgctatggacagtattcttgaagaggatgttcgtgcgcaattactagtcgatgaaatgagcactatccagagcaatatgattacctacgcaactgcattcggtcagattaaagtcatgggtaaaatctcccataaacttaaaaagatgggactcaatgcactagcgcgtcatcagcttaccgcaaaaattcttcaatggggtgacggtcaggacagtccaatacttcaaaaaatgattgatgaccttacggcgtttcctcacgaaaattaaatactgcatttgtcggcagcaacaactgttaaaaaagtgcgctttgtttatgccggatgcggcgtaaacgccttatccggcctacaaaatcgtgctaattcaatatattgcagaaaccttgtaggcctgataagcgtagcgcatcaggcagttttgcgtttgtcatcagtctccgatgctattaatccttaaatccccgccccctggctaaaatgctcttccccaaacaccccggtagaaaggtagcgatcgccacgatcgcagatgatcgccaccaccaccgcgtcagggttagcttttgccacccgcagtgctccggcaaccgcgccgccggagctgacgccacagaatattccttcccgcaccgccagttcgcgcatggtgttttccgcatcgcgctgatgaatatccagcacctcatccaccagagaagcgttgaaaatccccggcagatattccgtaggccagcggcgaatgccgggaatgctgctgccctcttccggttgcaggccgacaatggtcaccggtttggattgttcgcgcataaagcgactgacgccggtgatagtgccggtcgtccccatgctggagacaaaatgagtgatgcgcccgccggtttgctgccagatttccggcccagtggtggtgtaatgcgcataagggttatcgggattattgaactgatcgagcagctttccttcgccacgattcgccatctccagcgccagatcgcgcgcaccttccatgccctgctctttggtgacaagaatcagttccgcaccataagcacgcatcgccgcacggcgttcctggctcatgttgtcgggcatcagcaatttcatgcgatagcctttcagcgcggcaatcattgccagcgcaatgccggtgttaccactggtggcttcgattaagacatcacccggtttaatttccccgcgcttttccgcctcgacgatcatgctaagtgccgcacgatctttcacgctacctgccgggttattgccttccagttttaaccacacttcactgccgttatccggccccattcgctgcaacttcaccagaggcgtattgcctattgtttgttctaatgtactcacgatctctatccatacgtggtgttgcctgatgcgacgcttgcgcgtcttatcaggtctacaggttacaaaccttgccattaaaaagcccggatcgcgggaagcgcctccgggcgtttaacattcactcaacctatcaggcgctttgtgcgagagcaagttcctcatcgcgggtttcgatacgctcgtcgccgttatacagccgcgcatgttgcagaccaacgaataaacgctcgccacgctgcggggcatcgtcgccatgcatcacgaccgtcagcggttcgttgtaccaccccagcggctgcaccactaattgggtgtagtgacctttcgggctggcttccagtacctgtaccggcagcgggctatcgaggctggtacggcggctgatatccacttcccaagggcgcaggaagagatccaccggcccctgatacgcaggtgtgtagcccagcggccagcgatgcgcgccaacatggaactgcccgccgcgaatggttccctgcaggcggttcacttcgcccataaattcgagcacaaaacggatcgccggttcgcgccatacctgatccggcgcgtcagcctgttcaatattgccctggctcatcacaactacacgatcagctacttcggtcgcttcttcctgatcgtgggtcacaaaaacgctggtgaattttagttcttcatggagttgacgcagccagcgacgcagctctttacgcacctgcgcatccagcgcgccaaacggttcatcaagcagcagaatttgcggttccacagccagcgcgcgcgccagcgccacgcgctgtttctggccgccggaaagctgcgccggataacgatccgccagatgggcaagctggaccatttccagcaattttgtcactttcgctttgatggctgcggcattcgggcgctcgcgacgcggcagcaccgtcaggccaaaagcgatattgtcgaacaccgtcatatggcggaacagcgcgtaatgctggaacacgaaaccgactttacgatcacgtgcgtgcaggcggctcacgtcggtgccgtggaagcgaatatgcccgctggtttgatgctccagcccggcgataatgcgcagcagcgtggttttcccggaaccggacggccccagcaacgcgaccatctgaccactaggaatatccagactgatatcgttcagcacctgggtgcgaccaaagctcttcttaatattggcaatctcaatgctcatgatgttcctcctgctgtgcgcgtttttcctgattctccaggcgccactgcaacatactttttaaaaacagggtgataatcgccatcagcgttaacagcgccgcagcggtaaaggagccgacggtgttgtagtcctgctccagcaattcaatctgtaacggcaggctcagggtttcgccgcgaatgctgccggaaaccacgctcaccgcgccaaactcgccaattgcgcgggcgttggtcaacaccacgccataaagcagcgcccagcggatgttcggtaatgtgacgcgacggaacatctgccagccggacgcgccaagcaaaatcgccgcttcgtcttcctggctgccctggcttaacatcaccggcaccagttcgcgcaccacaaacggacacgtcacgaagatggtgaccagcaccattcccggccaggagaacataatttgcaggttatgctcgtcgagccaaccgccgagcgggccgttagagccgtagaacagcaaatacaccagaccggcaaccaccgggcttacggcaaacggaatgtccagtagcgtcagcagtaactggcgtccagggaagttaaagcgcgtcaccagccaggccagcagaatgccgaacaccaggtttaccggtacggcaatcagcgcgatcatcaccgtcagccagatggcgtgcagcatgtccggatcggccagattctgtaaaaccggcatcagccccttgctgaatgcctgcacgaagatgtaaatcatcggcaccagcaggatgaacgcgctaaccagcatcccgatgccaatcagaaaccatttgccccagttaatcgggcgcgcgtcataacgcttcaattgggtaacttccgccattaatgacctaccacacgccgaccaaagcgactttgcagagtgttaatactgaacagcagcagcagagatgccgcgaggatcacgctagcaatcgcgctcgctgccgggtaatcaaactcctgtaagcgcacaaaaatcatcaggctcgtcacttccgtcttccacgcgatatttccggcgataaaaatcaccgcgccaaattcaccaagactacgggtaaagctcagcgccacgcccgccaccagcgccggagaaagctccggcagcaccactttgcagaaactctgccagcgcgttgcaccaagcgtttccgccgcttcttcatattccgggcctaactcttccagcaccggctgcacggtacgcaccacaaacggaatgctggtaaaggccatagccaccgcaatccccagccatgtataggtgactttgatatcaaacttcgccagccattcaccgtaaaaaccgtttacggaaaagaggctggccagcgttaaaccggcgacagccgttggcagcgcaaagggtaaatccatcagcgcatcaagcagcgtgcggcctgggaagcgatagcgggttaggatccacgccatcagcagaccgaaaacgccgttaaaaatgcttgccacaaacgcgctcagcagcgttactttgtaggccgcgaccacctgcgggttggtgatcacctcccagtactgcgcccagctcatctgggccagttgcatcaccagcgcggagagcggcagcagcaaaatcaggcacacaaacagcagactggtgccgaggcttaaggtaaagcccggcagcacgcgtctggaggagacagcaaacatcagttacgccccgccgctaacagcttgtctaactcgccgccgctggtgaagtgggttttcatcacttccggccaggagccaaatttgtcttccacgcggaacagctcggtctgcgggaatttgtctttcagtttgtccatcacctccgggttattcacgcggtagtaatagtcggtgatgatggtttgcgcctgcgggctatagagccagttcagataggctttggcggctttttccgtaccgttggcctgcacgtttttatcaacccacgccaccgggaattccgccagaatgttggttttcggaatcaccacttcaaagccctgcgcttcatactgtttacggatgttgttcacttcgctttcgaagctaatcagcacatcgcccaggccgcgctcggcaaaagtggtggtcgcgccacgaccgccagtatcgaacacttcaacgtttttcaggaactgggtcataaactgttcggttttgcctttgtcaccaccgtcagctttatccgctgcgccccatgccgccagataggtataacgcgcgttaccgctcgttttcgggttcgggaaaatcagcttcacgtcggagcgcaccaggtcgttccaatcgtggatattcttcgggttacccttacgcaccaggaagcccatggtggagtagaacgggctgctattattcggcaggcggctctgccagtcggccgggatcagcttgcctttatcgtgcaggatttgtacgtcggtcacctggttataagtgacaacgtcggcttttaagccctgtaaaatcgccagcgcctgtttactactcccggcatgagattgttttatcgtcagtttgtcgccgccgttatcttttgcccattgttgctcaaacggcggattcagggcggcaaacagctcgcgggagacgtcataagaactgttcagcagttccgttgcctgtacatggcccgccagcagcagagaagcgaccagcgcgagactgttctttttcagtaagttaacggccattgcgcacccttataaatttaatgactttctaatagccatcatatttataacggacgtgaaaggagtaacggttttatataccgtttggtgatttggaagttgaaaagggaataagaacttggttcaacaggcgtaattgttgcagtcagtttggacacgaacagcgcggagaaaccggagcgtacacatagtacgtgaggatttcgagcactgcccggggccaaaatgacaaataaaatagcctggtgaacttagttcaagacgaaatcctccccacaaatgcagggaggaaacagaggtgaatcagataccgacgctaaccgtctccggcagtgtgctgccgccatcaatcacattctgtgtaccggttaaatagctggattcatcgcttgcgaggaaggccgccagttcgccgacttccagcggatcggcgaggcgacgcatcgggattgctttcgccatttcagtcagcacgctctctggatcttccgggttgctctggcgggcaatgctttccgccattggtgtgcgcacgtatcccgggcaaatggcgttaacgcgaataccagactgcgcgtactccaccgccaggctttttgtcaggccaacaatcgccgctttcgttaaggcgtacgccgtttcgccaggatcggccaccatatcaccagtgacactagacatcatcacaatgcgaccatctttgcgggcaatcatctccggcagcaccgccttcgtgacgttccatacgcctttaatattgatgtcaatatggaaatcgcgatcgtcatcgctcatatcgaggaaactgcccagacgacaaacgcctgcgttattcaccaggatatcaatgcgcccttctttttccttcgcgcgtttgatagctgcggctacgctcgccgggtcacgcacatcggcgacaaccgccgtacagcgatgaccacgaccacacagttcgtccgccagcttttcgatctcaggggagatatccagcaagattaggttcgcgccatgacgtgcaaaagttctggcaattccttcgccaattccctgcaatgcgcccgtaatcagtgctgtcttgcccgtgagtttacccattttaatgctctccttgttaatacagagcgttacactccattccctctgaaaatacaggataaacaaaatattgctgcggatcagctcactaattcaggaaaatctcaatccagtcgctgctttatgcatcatttcaggcgttgtgttagctcactgctgcgctgaatcattttcaaactctccacatcattgagttgcacaaggccaacaaacagtaaatcggtaacagaattttgcgccgtgcgggtagacatgctgctgctacgccattcggtttctccggaaacggtatcgagggtgaaatgcgccagccgccgcagcggagagtcagtcagagaagtaatggcaatcaccgttgccccctgctttcgtgccgcttctgcgcacaagacaatctcttttttactgccgctgtaagagatagcgatttgtacatcgccttttttcaacgcctgagaaacggtggcttgtacgtgcgtgtcggcttcgcaggccacgcgatagccaattttcatcagtttgaagctcagatcgcgccccaccagcgcgcttccgcccaggcccgttatctggataaacggtgctttactgatgacctcaatgattttttgcagccgcgcgtaatcgagcaacgcgcaggtttgctccagcgccagctctttttcgcgattcagtttgcgcgcgatcacttccaggctatcatcactggtaatgctactgtgcaggtgcagtgccgtggcattcgttttctcccggctggcactgtattcgcctattaacgccatacgcaattcagtaaatccttgcgcgccgagtttttgggcaaatttcactatgctgctctggctaatgccgagctgtttcgccatctgccgactagaaacggattgcagctcactcacgttggcctgcagaaagtcagcgattttttgctcgttttcggtgaattcactccccgcattgcttattttcgtcaggtacaacatcttccactctcctgggctggcagcataaattccgcttaagttcttatgacgctcttcacactctgcgagtgtagactcaatgattcctttaagcctgtcaattcgggatatatgattccatacatctgcaattatttgatcgtaaatagtaaggtcaccaccgatgcaatttgaaaagatgattactgaaggcagcaacaccgccagcgctgaaattgaccgcgtaagcacgctggaaatgtgccggattatcaacgatgaagataaaaccgtaccgcttgccgttgagcgcgtactgccggatatcgccgcggcgatcgatgttatccacgcccaggtaagcggcggcgggcgtctgatttacctcggtgcgggaacatccggtcgtctggggattctggatgccagcgaatgtccgcccacctacggcgtgaaaccgggtctggtggttggtttgattgctggcggcgaatatgccattcagcacgcggtggaaggcgcggaagatagccgggaaggcggtgttaatgatctgaaaaatattaatttaacggcacaggatgtggtggttggcattgctgccagcggtcgcacgccgtatgtgattgccggactggaatacgcacgccagctcggctgccgcacagtgggaatttcctgtaatccggggagcgccgttagtaccaccgctgagtttgccattacaccgattgtaggtgccgaagttgttaccggttctagccggatgaaagcaggtacagcgcagaaactggtgctcaatatgctttccaccgggctgatgattaaatccggcaaagtgttcggcaacctgatggtcgatgtggtcgccaccaacgaaaaactgcatgtgcgacaggtcaatattgttaaaaacgccaccggatgtagcgcagagcaagcggaagcggcgttaattgcttgcgagcgcaactgtaaaacggccattgtgatggtgctgaaaaatctcgatgccgcagaagctaaaaaacgcctggatcaacacggcggctttattcgtcaggttttagacaaggaataacccatggccaaagagatcagcagtgaacttctgaacaccattcttacccgtgtcggcggaccgggaaatatcgccagttgtggtaactgtatgacgcgcctgcgtctgggtgtacatgacagtagtctggttgatcccaatatcaaaacgctggaaggcgtgaagggcgtcattttgaccagcgaccaggtgcaggtcgtttttgggcctggtaaagcgcatcgtgccgcaaaagcgatgagcgagctgctgggagaagcaccggtacaggatgccgcagaaatcgccgcccagaacaaacgtcagttaaaagccaaacaaacctccggcgtgcaacaatttctcgccaaattcgccaccatcttcacgccgctgatccccggttttattgccgccggtctgctgctggggatagcgacgttaattgccacggtgatgcacgttccggcagatgctcagggaacactacccgatgcgctgaattttatgaaggtgttcagcaaaggtttgttcactttcctggtgattctggtgggctataacgccgcccaggcatttggcggcacgggcgtaaatggcgcaattatcgccgcgctctttttgctcggttataaccccgcagcgaccaccggttactacgccggttttcacgatttctttggtctgcccatcgatccgcgcggcaatattatcggcgtgctgattgccgcgtgggcctgcgcccgcattgaaggcatggtgcgccgctttatgccggacgatctcgacatgctgctgaccagcttaatcaccctgctgatcaccgctacgcttgcgtacctgatcattatgccgctgggtggctggttattcgaaggtatgagttggctgtttatgcacctgaacagtaatccgttcggttgtgcggttttagccgggctgttcctgatcgccgtggtatttggcgtgcatcagggctttattcctgtttacctcgcgttaatggacagccagggattcaacagcttatttcccatccttagtatggcaggcgcgggccaggtgggcgcggcgctggcactctactggcgggcgcaaccgcacagtgcgctacgcagtcaggtacgcggggcgattattcccggcctgctgggcgttggtgaaccgctgatttacggtgtcaccctgccccgcatgaagccgtttgttaccgcctgtttaggcggcgcggcgggcggtttgtttatcggcctgatagcctggtggggtctgccgatgggcttaaacagcgcctttgggccgtctggtctggtagcgctgccgctgatgacttccgcacaaggcatccttccggccatggcggtttatgctggcgggattctggtggcatgggtttgcgggtttattttcaccacgctctttggctgccgtaacgtcaatctggactgatatcatgaaacggacaatgctctatctttctctgctggctgttagttgtagcgtcagcgccgcaaaataccctgttctgacagaaagcagcccagagaaagcagggtttaacgtcgaacggcttaaccagatggatcgctggattagccagcaagttgatgtcggttatcccagcgtaaacctgctgatcattaaagataatcagattgtgtatcgcaaagcctggggagcggcgaaaaagtacgatggcagcgtgttgatggaacagcctgtcaaagccaccaccgggacgctgtatgacctggccagtaacaccaaaatgtacgccacgaacttcgccctgcaaaagctgatgagcgaaggcaaactgcatcctgacgatcggattgcgaaatatattccggggtttgccgatagtccaaatgacaccattaaaggcaaaaacaccctgcggatttctgacctgctgcatcacagcggcggtttcccggcagatccgcaatacccgaataaagcggtcgcgggcgcgttatattcccaggataaaggccagacgctggagatgatcaagcgcacgccgctggaatatcagcccggcagcaaacatatctacagcgatgtcgattatatgctgcttggatttatcgtcgagagcgttaccggtcagccgcttgaccgctatgttgaagagagcatttatcgcccgctcggcctgacacatacggtatttaacccgctgctgaaaggctttaaaccgcaacaaattgccgccacggaattgaacggcaatacccgcgatggcgtgatccatttcccgaatatccgcacctccactctctggggtcaggtgcacgatgaaaaagccttttatagcatgggcggcgtttccgggcacgcaggtttgttttccaataccggcgatattgcggtgttaatgcaaacgatgctgaacggcgggggctatggtgatgtgcagctgttcaatgcggaaacggtgaagatgttcaccaccagctctaaggaagatgccacttttggcctcggctggcgcgtgaatggtaatgccaccatgacgccgacgtttggcacgctggcaagcccgcaaacctacggtcacactggctggaccggaacggtgaccgttatcgatccggtgaatcatatgacgattgtgatgttaagcaacaagccacatagcccggttgccgatccgcaaaagaatcccaatatgttcgaaagcggtcagttgccgattgcaacttatggttgggtagttgatcaggtgtatgcggcgttaaagcagaagtaataaaaaggccagtcagtaatgttactggctggtctgagagtgctgacaaacgcaaaactgcctgatgcgctacgcttatcaggcctacgtggagcccacaatatattgaattagcacgatttcgtaggccggataaggcgttcacgccgcatccggcgtgtacaacgcgcacttggtcaacaatctgaggccagtcagtaatgttactgcctggcctttaatcaatgaatcagaaacgcttacagcgccatcaacttgtccaggctcggtgcgaaataatagccgccggttaccggtttggtgaaacgcaacatcgcatcacgcttaccatcggtatcgccaaacatgctcagcagttgctgctcaatgttatgcagacgcgcgcagtaggcgcagaagtacagaccgtgagtgccactggcagtgccgtacggcaggctctggcgaacaatcttcagccctttgccatcttctttcagatcaacgcgggtgaggtgagaggtttccggacgttcgtcgccgtcgatctcttcgttggcctctttggtgcgcccgatcaccatctcctgatcgtgaacgctcatccggttgagctgcttcaggttgtgttcccaacgctggacaaacacatagctgccgcccgcatccacgccgtctttgataaccgccacttcgcgacgcgtctcttcacccgccgggttttccgtaccgtcaacaaagccgctcaggtcacgctcttcaacccaacggaagccgtggatctcttctttcacttcaatgcagtcaccaaaggcttccatcgccgcctgggcgacagagaagtttacgtcgtgacgcagagaaagaatgtggatcaacacatcgaactgggtcgtcggcgcaaggcctttaccgtagcccggaaaatctttcagctcttctgccccaacgccgccgctcagagcgcgccaggtgttgttaccaaaggcaaccaccgcaccaagatgcgcgtccgggaatttcgcttcaaaagttgccagtttgtcggcaaatgttttactggccgcacgcagggcgtcaacttcccctttcacgttggcttcgatccaaatcgccgcgcggcaatgttctggcaaaatgccactctgaacctgagacattgttcctcctgaaaataataatgccacgcaatccgtggcattgttgagcgctattttacgtgttttttcgcggcggcggtttgttcagacgcaaattaacgccgccagataattttactgactttccagtttttcagggtatcgtcgctaggcattaacccttcaggaccacgccattccccgctgaactggtagctaatatgttgactgccttcggctttacattcgacggcacgattatcatcaccatcagctttttggcaattgccaaatgctttgctgtaaaggtcgctaaacggtgtaccgattttaacaccggtgtcagcaggaatatcgctatccagcacgtcaatgcgactgatcgtgccttgatcgccgttaatcaccatcgccacgttgtcgcccttcatcacttcaaaaaagcgcaccacgttgccgttcgcggttttcattccgctgcgcaggcgataatcgccatcaagcgcatcggcaatggcttgttcttgcagtggtgtggacgccgttaattcacccacgccctgctcgctcactttggtggagctcccaaaccagttccacgggttagcggcagaccagttaacactgctcatcgtggaacagccggtcagcatcaatggcatagcgcataacattaaacgcaggcttttcatgtcacttcctttggttattcaataacgttgcttggagtgcaaattcaccaaaaagtgccgttattcttttacttcataaaaacaagcgcgtaaacgtcgattggtcagcagccagattaacgccacaatatccgccactaccagcgccagaccgataccgctaacggattcaccgttcagccacagccacggttgccagcaaagtaaaaccacctgcgccaacagcaacagaaaatagagtacacgccaggtgcgaggaaacgtagcccgccgaccgctcaacaaaaacgccagcaccgccggaatgccaggaatcagccccagccagaaattatcgtgatcgggataaaacagatttagcagcgcagtaccctgctcgcggctcgcaccggcaatgacaaacagcacccaggttcgcgcctgaagcaatagcacaagccagaagagcaagggtaaacgcaggcgaccgtgcgcatcataatggacaggatgaaactcagtactcttcatcttcaatcaaacgcttacccagactcagcacgtcggcgtgttcatatcccaggcgttcatacattccgagcaccatgtcgttatcttccggcacattgatctgaattttcgggcagccacgagcaatcagctttttctccagccgattaagcaacgcattggcaatcccacgcccacgaaactctggatgcacgccaagataataagcagacccgcgatgcccgtcataaccgcccatcaccgttccgaccacgtcaccgtttacctcagcgaccaaaaacaaactgacgtcatggttcatcttacgctcgatgtccatttccggatcgttccacggacgcagcaagtcgcaacgctcccaaagggtgatgacctcttcgaaatcttcctggcgaaatacgcgtatctccatggtattcgttacctttttgcgggttaaaaggctgattatggcgtgaacggtcgaattagccaatatctgacgaaaatcggttgaaaaagtggcataatggggagttgtcaactattgaaatgaaaagtaaaacaattctcaacagcaaaccgtcgtaacggattacgcgatacgatataacatctggaactttattattacaactcaggccgtatgagcacttttaaaccactaaaaacactcactagccgccgccaggtgctgaaagccggtttggctgccctgacgttgagtggaatgagccaagccatcgccaaagacgaacttttaaaaaccagcaacggacacagcaagccgaaagccaaaaaatctggcggcaaacgtgtcgttgttctcgatccaggtcacggcggaattgataccggagcgatcggacgcaacggtagcaaagaaaaacatgtggtgctggcgattgctaaaaacgtccgttccattttgcgtaatcatgggattgatgcgcgtttaacgcgttctggcgatacgtttatcccactttacgatcgcgttgaaatcgcccataaacatggcgcagatctgtttatgagtattcatgccgatggctttaccaacccgaaagctgccggtgctagcgtatttgccctctctaaccgtggggcaagtagcgcaatggcgaaatacctgtctgaacgcgaaaaccgcgccgatgaagttgccggtaaaaaggcgactgacaaggatcacctattgcaacaagtgctgtttgatctggtgcaaacagataccattaaaaatagtctgacgctcggcagccatattctgaagaagattaagccggtgcataaactgcacagccgcaacaccgaacaagcggcatttgtggtgttgaaaagtccgagcgttcctagcgtgctggtggaaaccagctttatcaccaacccggaagaagaacggctgttaggcacggcggcgtttcgtcagaaaatcgccacagcgattgctgaaggcgtgatcagttatttccactggttcgacaaccagaaagcacatagcaaaaagcgataagttatgaaacccgacgcacaccaggttaaacagtttctgctcaaccttcaggatacgatttgtcagcagctgaccgccgtcgatggcgcagaatttgtcgaagatagttggcagcgcgaagctggcggcggcgggcgtagtcgggtgttgcgtaatggtggtgttttcgaacaggcaggcgtcaactttagccatgtccacggtgaggcgatgcctgcttccgccaccgctcatcgcccggaacttgccgggcgcagtttcgaggcgatgggcgttagtctggtagtgcatccgcataacccgtatgttcccaccagccacgcgaatgtgcggttttttattgccgaaaaaccgggtgccgatcccgtctggtggtttggcggtggcttcgacttaaccccattctatggttttgaagaagatgctattcactggcatcgcaccgcccgtgacctgtgcctgccatttggcgaagacgtttatccccgttacaaaaagtggtgcgacgaatacttctacctcaaacatcgcaacgaacagcgcggtattggcgggctgttctttgatgacctgaacacgccagatttcgaccgctgttttgcctttatgcaggcggtaggcaaaggctacaccgacgcttatttaccaattgtcgagcgacggaaagcgatggcctacggcgagcgcgagcgcaatttccagttatatcgtcgcggtcgttatgtcgagttcaatctggtctgggatcgcggcacgctgtttggcctgcaaactggcgggcgcaccgagtctatcctgatgagtatgccgccactggtacgctgggaatatgattatcagccaaaagatggcagcccagaagcggcgttaagtgagtttattaaggtcagggattgggtgtaactccctcacccccactcccgcatccgctgatgcagcgtcagactcggcttctcggaaaacagctgctggtaatccgtggcaaattgccccagatgccagaatccccactgcatggcggcgtcttttaccgtcatactttggctccacggacttatcagttcgcggcgtacggcgttcaggcgaatgcgtttcagccacgcgttcgggccaatgcctaaaatagcgtgaaacgcgttttgtagcgtgcggcggctgacatgcagttgattacacaaatccagcaccgtcaccggttcggacatgttttccagcacatattcacgggcgcgggaaagcaatcgacggtaactctgatgactgatgctttccgccgtcaccattggttgcgcttcttccagcatggcccccatcgccattagcaaattatcccccagcacttttcgcactgcaggctgatggagattttccggattctcgcaaaacgtcgccagcgcctgttggacaaagccccacagcgcggctttatgctgctctttcacttccagcgcgctctggttacgcaacatatgtaatacccgatccgggttatgcaaaaagttagcctgccgggtgatgacatcttcagaaagcaccacgcccaggatcgtgtaatcatccggcgtgctcagttcaaattcagtgccaccagggcgggtggcgatttccgcgcttcccagacattggctaccgataaatccctgctcaccgcgcgtcgccggaatgccaaaccagaagctgttcggccagaccaggcagctctgacgcagcgccagaccggtgtattcacgaaaaacctgaatatcatcgagtagaatttccgtaaattcaccatgaaacttgcccggatgcagctgatcgtaaatctgctgccaggcggtaatcgttaaagcatgttcatagacatccgttgtctgtcgttgatgaacattatccacttcgaccttcggcgtgagcttcaggttttcgggtaagggttcatgataaagatggtgcaaattggctgtacgggtctttttcatgatgttaatgccgggtgttgtaggacacccggcacctccgacaggttaatggggcttgagacgataacgactactgcgtttacgtaacgtcccggcagaaaagagctgttcgagcgcatttctggctttttccagcggccagccaaagtgggcagccacttctcctgccgtcattccctgacgtacacttgttaacagcgccaacaactcgtcagcagattccgcgacgataactggcgcgtcgggttcccttacgggttgcttcggctggcggttaaagccagtaaccagccactgggtgtcatcgtctggccgaccgatctccttgcggctgatgacacgcccggtacgcatcgcggcagcacaacctgcgtccagcgccgcacgacacgccgccagatcgccttccaccaccagcgttaagcgaccagggtcaagcacttcgtgactgagcagacgaacgttagctgctttgagcatggcatccgctgcatctatcgcggcgaccatgccgtccacttccagcaatcccagtgcattgatcatcggcaacctccgttacgcacgctggattggattacgcgcgatttccagcactgcatcggtaaaggcgttacaggctgctttacacgctgcctggctaccggttaaaaatgctgcgctgtagttggtttcagacggtggcgggacataggtcgccagctgtacgtcggcagacttcagggctgcatcaatgccataggtcgcttccagcggcggtgccaccagatacgccatcggatcgccaagcgtgatcccggcggtactactgagataagaaccggtacggctaactacatgtgccaggaatgccgtatcttgcgcgtcattagcccactggaaagctgcgccattttcaatatgcgcaatcatcgcatccagacctgcacgcacttccgccgggtttggcccaccaagcataatcagcacttcaccggcagtcggactcgggccgtgtgcagcgcccgcatataggctgcggccatacaccacttccaccatcgcctgcttggtcgcttcatcagcggcaatgtaggtgacgtcatcggagtcggcagaaatcagaccgaggctacgaatatgcggcggcaatttcagttcacgcgcaaaatcggcgttaacggaggcaatcacccgcatagcggtgacagacggtcgaatcaaatctaaagctggcatgatgcctccttatcgggtcatgttgatgccggatgctttctgctccagcatacgtttcgccaaatccacaatgacggctgcggcttcaaccggcggcgtgccgccctggtgaatgttagagatacaggtgcgatcggcctcaacggtggtcgccatacgcgggctgtaaacggcgtagcaggagaggctttcactctgacccaaccccggacgttcgcccaccagcaggatcactactttcgcgccgaggatctcaccgatctgatcttcaatcttcacgcgaccataacgaacaaagaatggtgtaccgactttcagcccggcctgtttcaggcccgccatcagcggtggcaggatctcttcgtagttcacggtgatcgcatcagtactcaggccatcagaaataacgacctgtacgtccggattggcaacacactgcgctttcagcgcttcaacagcttctgcacacaggcggcggcccatatccgggcgagtcaggtagagatttttgtcgctaatttcagagcgtacttccagcaagccctgcgctttcacccactcttccggcacttctttcagtacggtatctttgctacgagagtgatcggccaggaaacgcagcagcgcctgcgtacgtggacgcggaccggcacgaccggtacaaacgcgggccacggtgctgcggcgcagttctgttaatacgtctgcgcgatgcggattttcaacaccaatccacgcttttgcttcagcggaacctaaatccagcgcacagctttcgctggtcaccggtgccgcacagttggtggtggcgcactttgcttcactcggcgcgggggccgcttgtcccatactcgccatcacgctgcgtacaatttcttcaatctgtttttgatccatgatatgttatctccgcgtcatcagaagaacagactcggatcgcccgcccgtttggtcaggcgaccgtttgccataatgcccatgctttccagccagcgttcaaactccggactcgggcgcaggttgagtaactgacgcacagtggcggtatcgtggaatgcggtggtctggtagttgagcatgatgtcatcacccagcggcatccccatgatgtagttgcagcctgcggtggcgagcaggatcatcaggttttcgttgaggttctggtcagcgtcagcgtggttggtataacagcagtcacagcccatagagatgccgctcagcttgcccataaagtgatcttctaagccagcacggataatctggcggtcgttgtagagatactccggcccaataaagccgaccacggtgttgacgataaacggatcgtaatgacgcgccagcccgtagttacgtgcttccatcgttacctggtctgcgccgaagttagcgccagcggatagcgcagagccttgtccggtttcgaagtagaggcagttttccccggcgatacggttgaactccgcgcccactgcgcgcgcttcgtcgagcatcgccagctccacgccaaactctttcagccctttttcgctgccacagatactctggaaaatcagcccgcccggtgcgccacgacggatcgcttcgatctgggtggtgacgtgcgccagtacacagccctgagttgggatgttgaatttgtcgatcacgccatagatggtatccaacacgcggcttaagttttccacgtcgtcagtcaccgggttaacgccgatcaccgcatcgcccaccccgaaggaaagcccttcgtagatttgcgcggcgatactttgcacgtcgtcacgggtgtcatttggctgcaaacgggcgctaaaggtgcccggaataccgatggtggtattggcctttttgattaccggcattttcttcgcgccgtagatcaggtccgcgttggagcaaatcttcgctaccgccgcgaccacttcgctggtcagccctttgcgggtaaaggcaatgtcgtccacgctggtttcatcgctcagcacatactcacgcagttcgctgatgctccagtttttaatctggttgtaggccgtttcgttaacatcgtcctgaatcagccgcgtcacgcagtcatcttcataggcaatcaccggattattgcggatgtccgctacggtcatttcgctcaacacctgctttgccgccacgcgctcctgactgcttgccgctgcgacgcccgccagcacatccccgctacgcagttcgttggctttagccagcacctcttttacatccttaaactgatatacattgccgaacaatgtggtctttagtttcataagtcgttccctcaggaaggaaatgcgagacttttcaccgtcaccggcacaacgcttccgccaaaaagaggcgtaccaatgtcgatatagtcccccgcgcggacaatcacttcgtcaatgactgccaacgggagttgttgtagctgtgggcgcaacaacatgcccagagctttaccaaagtcctgcccggccaccaccagcaggggatgcggattcggaaaacgcgcgacgaaatcgaccaacgcgttgatgaccgtcagtaccgcggcgtaacgcacaggcaggctggcgggaagcgccagcacgtacgcgtcagttttgggatcaagatccagctgaatcagcgcctgttgccaggcccccaccagatccgtttcatcaatcgggatcgccaccggcaaattgcgcagcggcagttgtacgccctcaagccagattgtgctgccagagaggctaagggtatgcgcgcccgcgccaatcaccgtggcgcgcacggtttgcgccggaaactgtacgttcatctcacgcaggcgcggatggtcatgcagcgcagttgccagcagcgggccaatatcggcaaaacagaacgggtcggcgggctggtggcgataacattcgcccacgccgccagaaagcgtaatgatttcgggcgtaacacctgcgggcagcaaaccggtttgcatcaatgcctgcgcgagcggactgagcgttccgtcaatcacttcgacaatcagttctgccatccgccgggtcacctgcaccagctgcgcgccggtcaggctacgggcgtcggtgcctgcaccgaagcactcatccacaatcatctgccccggtttatgagcgtaaaccacgcgcccgtggctgtcggtttccagcaggcgaccaccgacgttgaggcaggcagtgccgctgatttttccggcatcgaacagggcgtagttcgcggtgccaccgccgatgtcgatattcagtacccgacacagccgttgttcagaaagggtttgtgccccggctccgtgaccggcgatcacggattcgaggtgcggcccggcgctggcaacgacaaaatcgcccaggctctgagagagcgccatcaccgccgggcgagcattgcgggttttcgcgctttcaccggtgatgatgatggcaccagaatcaacgctttccggctcaatacccgcagcatgatattgctcgagtattaaggttttcagttccgcttcttttaaaccgccctgtttatcgacaggggtaaagaacaccggactttgccagctaatttcgcgtttaatgaattcgtagcgcggcacctggctcaccgccgcacggttaaccagctccagccgggagaaaatcacctgggtggtggtggtgccgatatcgataccgacgctcaatagctggcgagtgttcacgattgtgcctccgcttcggtttaagtcagctttgtgcctccgcttcggttttagtcgcggtcgcgtcttcttttggcaccagcatcatcgccacgccaatcgccgttacgccgccgatcaacttgccgacaatcatcgggaagatcatggcgttcatgttggcagcggcgaagcctaagtggtcgcccagggcgaaagcagcggaaacggcgaaggcgcagttgatgactttgccgcgggtatccatctgcttcatcatgccgaacatcgggatgttgttggcaagcgttgccaccatgccggctgccgcgatgttgttcatattcagtactttaccgacgctcatcagcggtttttcaaaccagcgagtcagcagcagcaccatcggatacgcccctaacagaacgcaggagatagaaccgataacttcaatggcgcgcatcacctcaccgggtttatcgccaggggccataaagataggatccagaccggggatcagttcccagccaagcaggaatttcactaccgcagcggcaagaccgagggtgatcaatgcaacgaggaatttggcgaagatctggaagccgttgatcattttttccgggatgaatttcagccccagcgccaccagaatcgcaacaatgatcaccgggatcatgttcatcaggatcagggcgaaagtgaattccaccggctggccgttgatctgcacaccggagtacatagcaaccagaccaccagcgatacaaccaatcggaatggtcacaatgcccgccagcacgccgagcgccagataacgacggtcagaaggttcgataatgccgagcgccaccggaatggaaaacacaatcgttggccccatcatgctcccgagaattaacccagagtatagccacgcggctacgtcgccgcccgccagctctttggcgaggaagaagccgcccatatcgcacgccagcagtgttccggcgaacatgcttgggttagcgccgagcatttcgtaaaccggaataattaccggcccgagaacgtgagccagtaccggtgccagcgcggtcataccgaccatcgccaggcccagtgcgcccattgccataaagccttcttcgaactgaccgccacttccttcgatacttttaccgaacttaccgaggaaacgagcagaaccgccgaactggctcaggatcctgtctacggcagctatcagcataaagaacatcatgatgtacatgatgatttcgttaattcccatcgcctttactccctgttagttgttatttattggcggatgcggcgtaaacgccttatccgccctacatgtgcaatcccgtaggctggataagacgcggcaagcgtcgcatccggcaattgcaccgcgccactggcggatgcggcgtgaacgccttatccgccctacatgtgcaatcccgtaggctggataagatgcggcaagcgtcgcatccggcatttattgcgccgctgcgtacaggccgacaatctgctccaggctggcggtacgcgggttactgcgcagacaaatatcttccagcgcggcctgcgcccatgcgccgtaatgcgcagatgtcgcaccaacatcgcccagtcgtttaccaatcccaacttccgcaatcagctcacttaccgcgttaatagcgtcacgatcgtcggattttttagttcgcagtgcccgaccaatctgactaaagcgttcacgacaaaccatccggttaaattccatcaccgttggcagcaacatggcgttcgcgagaccgtgcggaatatgcagcgccgcgcccggctgatgcgccatcgcgtggcacaacccaagacccgcactggaaaacgccattcccgccatacaactagccagcaacatgctctcgcgcgcggcaaggtcgtgaccgtagcccaccgctttcggcaggcttttgccaatcatcgcaatggcaccaatcgccagactgtcggtaaacggtgtagcgttcagggcgctgtatgcttcaatggcatgggttaacgcatcaatgccggtcatcgccgtgacatggctcggcacaccttcggtcaatgcggcgtcgaggatcgccacatccggcatcaggctggcatgggctaacacctgcttgcgcccgctcaccgcgtcgataatcaccgttacattggtggtttcagagccggttccggcggtagttggaatggcaatcagcggcaagcgcggttgcagaacgctggtttcactcatctctgccagcgtgctatccgggttcgtcaccagcaacgtcacggctttcgccgcatccagcacgctgccgccgccaaacgcgatcaccccatcacagccactctcacgcaactgcgccacggctgcacacacgtcggtaatgcacggttcgcccaccggacatggccagagcgtcatggcgatacctttaacggtcaggctacgcgtcagcccggcggtcatccctgcctgatgcaaaaagctgtctgccatcacgaacagatgtttcagcccacgcgtttgcgcttgctgtccgcaactgctcacgctgcccggaccgcaaagcgtcaccggtggaacgctaaatgtttttacccgttgcagattcagggtatcgaacgcctgaaagagcgcggtctgcaattcattttgcatatagcccctccgctttctctcgcccactactggcgatcgccagcggggtcataaacaaactgtgctgcggtaaatgcacctgtaacgccgggaattgtttgcgaaacagttccgccacgcccggttgcatacaagagccgcccgccagccataaatcagtaatgccctgcccttcaatatgccgggcgacaatgtccgccattttttcgtacaccggtttcaccgcaggccaaatctcttcaccgtgaccgcgcttgtactgctccgcctcttccaggctaatacggcgatttccggcgagagtcagagagatgtgatgtccgccggtggcttcatccgcgctgtacgtcaccttgccctttttcacgatggcaatgccggtagtgccgccgccgatatccactacaccggcgttgtccagttgcagcagatccgcaactgcggttggctcatccagcacatggctcacttccagtccggcagattccagcacgttgatggaaatacgcgggtccgtacctggaggaaaactagtcgccgcatggctaaaacgacgaccgaattgctgctcgagcgtgtcgagatggcgacgaacaatggtgacagcgccgaagaaatcccagacgatgccgtcgcgaaccacatcggcccagtcgaggcataccgccactggctgaccgtcgcggtcgacaaccatgctcaccacatcgcaggtgcccagatccacccccagccacagcggagattccgtcgcggcgggcgtctggttacacagcgttgccgccgtttgcagacgtggggtgagccattgttcgtcgtgcgccatctgttactccttaaacaatgcgaaacgcatcgactaatacacagcgacgcagacggacaaacgtacgcgcgctggttaccccttcaccggttggcgtggtgatggtcatggtggtccagccttccccgcccagccccagcccggcaatgcacggtccgttcttaacgaaaatgctggtatcaatagcattcgccatctggttcatgttttcgatgttgcggctgtgcattgccgccgtgtggtggcaaccgccttccagtttcaccgctagcgcaatggcatccgccacgttggcgacgcgcacgacgggcaacaccggcatcatcagttcagtcacggcaaacggatgttctgcggtggtttccacaaacagcaggcgcgtttcttgcggaactttaaggccgattgccgccgcgattttgcctgcgtcgcgaccaacccagtcacggctgacggtgccttttccgcgctcgtcgatatttttcagcaacaccggttgcagctgctgcgcctgttctgcggtcagtttcaccgcgtgctggccttccatcagacgcatcagttcatcggctacgctatcaacaacaatcagtaccttttcgtcggcacaaatgatgttgttatcgaaagaagcgcctttgacgatggactgagcggcacgggcgaggtcggcggtttcatccaccactaccggcgggttgccagcgcctgcggcaatcagacgtttattggtgtgtttacgcgccgcttctactaccgcttcgccgccggttaccaccagcaggccgatacccggaaacttgaacaagcgttgcgcggtttcgatatccggatttgccacagtaaccagtaagttttccggcccacctgcggcaacaatcgcctggttgagcagcgtaatcgcccgctgggagacttttttcgccgccggatgcggggcaaaaatgacgctgttgcccgcggcaatcaggctgatggcgttgttaattacggttgccgccgggttagtggaaggcgtcacgctagccaccacgccccagggtgcgttttcaattagggtcaggccgttgtcgccagtcagcacttgcggagagaggcactcaacgcctggtgtgccgcgcgcctgagcgacgttttttgcaaatttatcttcaacgcgccccatgccggtttcactgacggcaagttccgctaaatctctggcgtgtttttcgcctgcttcacgaatggcagcaatggctaactggcgcattgccacgctttttaacccttgctgggcgactttggctgccgcaacggcgtcatccagggacgcgaaaacgcccatctcatgaacggcggcggacggcgtgtcactgctttgcattttcagcagtaccgctttcaccacctgttcaatatcctgttgattcatgatgttctgccttatttgtggaaaattacctgaccgccagacaccacctcatcgacaatgccaatcacgcacagatcgaccggactcgtttcgcttttatgcgcctggcgggcggaactgccactcaccagtaacacccactccccggttcccgcgccaatattgtcgatggcgacggcgcattgcccgtcaggattaccttgtggatcaatcatttccaccatcagcaatttgtcatgcgccagtccgtgatggcgtacggtacaaacaatttgtccagtgacgactgccagtttcatacccgcctccgtggcgtatttcaggtaaaagctccccctaccctccgcagaaggtaaaatgaaaaaggagagagcgtgacgcccgaatcgacgtcacacagggtgattacaggttgctgctatcgcctttcaggccgatcgggaagacttcttccaggtcgccgtgcggacgcgggataacgtgtacagataccagctcgccgatacgctgtgccgctgcggcacctgcatcggtcgcggctttacaggctgcaacatcaccacgaaccatggcagtacacaggccgccgccaatctgcttaacaccaaccagcttgacgcgcgcagctttcaccatcgcgtcagaagcctcaatcagtgcaaccaggccccgggtttcgatcattcctaatgcttccattgtgctttcctctttatcagggtccagaacgggaccgttcattcaaccagtgtttgtaaactgctttcgcggttcacttctgtctgacgcggcacagctgccaccagcgccagctcgataatttcctgcacgctacaaccacgagagagatcgtgcatcggcgcggcaagtccttgtatcagtggcccgacggcacgatatccgccgagtcgttgtgcgattttgtaaccaatatttccggcttccaggctcggaaaaaccatcacattggccttgccctgtagcgggctggcaggcgctttttgcgccgccacttccggcacgaaggcggcgtcaaactgtaactcgccatccaccaccagctttggtgcgcgctcacggacgatttctgtcgcctgctggacgttagcaacacaggggtgacgggcgctaccattgctggaaaagctcagcatcgccacgcgcggctcttctccggtgatggcgcgccaggtttcggcactggcaagcgcgatatccgccagctgcgccgccgtcggctgtggcaccacgctgcaatcggcaaagcccaacgccgggccgctgtactgtggcaacatcaggaaaatggaagagagcgttttacagcctggctgcaagccgataatgcgtaatccggcacgcagcacatttgccgtggaagagaggttgcccgcgatacagacatccgctttaccggcgctgaccattgctgcggcgaacatcagagggtcggtaagtttttccagcgcatccggcggcgttttttcgcccgcgcgggccagccagcgatgagcaaattcttcccgcattgcgaggttgccatgcggatcaatcacctgtagcccgtccatcgccacgccgtgactgagcgcaaactgacgaagttcaaacggattggcgaccagaatgggcgttgccagaccttgttgatgtaaatattgcgcggctttcagcacacgttggtctaacgcatccggaaaaaccactctggcgggcgctcgcaacgccagttcacgacaacgttcaataatcattgcgtttcccccagtcgttgttggatctgcttcaccgttagcggctgcttcgttacgctcaggatcatcatcacgtagaccgtgctgctaaggcggttcagcgcctgcaaaatgtccgggcgtaatacttcaaagctgcgggtgataaagacctgcgccgctacggtttcggtttcccgcactttggtgcgtagcagattgagcaacgcagcatcgcgcccgtggctggcttccggcaccagatgatcgtggtcgagatagcgcagcggctgatgagaaagccgatgcagatcttcgtcagaaagcccgacaatcgcctggcagcccagcggttcccccagcgcatcggcgcgcataatgttgccaagacggctacggatatccgccagccacggctgccacggttccgccagttcaatttgcagccacactgccagcgcaatggtgctgtcgagaaccgcgcgaaaacccagacgcggatcgcttttggcgaccattttttccgcgctcaggtgagtcagcgtatccggcttttttgccaccggctggcgacacagttcgcagcacgcctgcggatgttcatcgctactggtcagcccatgaacgggctgcggctgctgctgttcatcgtcaacaaacaggcggccctgctcgtcaataaacttgatgcgcagatggcggctttccagcaactcccgggcagagggcgtcaggcgactgtccgcagggagatggatctctgcgccttcgctgagcgtatggttcgctcttagccatgcttcggtgatgaaatctttcatagggattgccagttagccggccaggcgacatacaggaatttcacgctggatgtcgtaccaaattcgatgctggagcctttcgggataaacatcacgtcgcctgctttggcgatcatggtttggccttcgtggcgaacatgcagctccccttccagcaccatgtcgatttcgtcgtagttcagggtccacgggaagaatgcgttctcccactgcataaaaccggcggccatgctgctgccgtcgtctccggtcacaagatcagtcaagcccacgcaatgcggctctgcgccgtcgaaacgaccaaacttgacgctactgccatcaatcactttgatgccgcctttgccggtcacgcttttgaagctcggctgcattgcgccctgctccaggctctgtttttccttcatcactttttccatcagctgtgcgaccaggctttcggtaaactggccttccggcagctgggcaatgatggtttcgcggatgcgctggctttcggttttgtcggctggcacgctggcgggcacggacgccgttaccgggatgctttcatcacattcggtgatggtaaaacccagtagatccgccacttcacgggcttccggggtaataatgctggcgcgcagaaccacggacattgcctgttcgccgcgcgcgtgtgcttcacgaatatcattcgctgtgatgagttttttcacctgcttcctcctgtttggtgagagatgccagataatccaccagttgctgcacgctttgcgggtcgtggctgtttagctcgaacatcggctcttcgaaacccgtctcaagcaataactttcgcgttgcggcgacgtcagcatctggcatgtccgttttactgatgacggcgatttgccgtttgctgacgccaatatccagcaacccggcaggcaaccgactttccgggtcatttgcgccatggacatagatcagcatgtctacatcctgtagcgtggtaattaaggcgtgataccagcggggatggttaaaatattcacccggcgtatcaatatcgcccttatcattaaattccacggcctgtgtttttctggcgagggtataattcccctgcaacgcattaaataacgttgtttttcctgccccgacgctacccacaaacgcaattcgtttcatgaatgcctcgtattaacttttggtcatttcacaaagcgtataatttaataagcgacctaaaccgctgacggtttgacttaacgcttcttctactgcgcccacgctgccataaatcaccaatgcaccgctgaatcggtcgagaaaaccgatatgcacatcagcggctttcagcgctaaatcaccggcgatcatcgccgtttcgccgggagttagcgtcataatgccaattgcgcccgcatccggaacgccgattttcttcgccagttcctcaccgggatgcgcgatgagatgcgccagtgtgacctgtttgccgggcacaaattcctgaatgatgcgttctttatccatgagtcgccgcctgtgaaaaactttcgtgtatcgtgacaatttttcgtcagagtaaataacaaaattcggcaagcgcgtttaaaaggtgaggtagatcactaagaatggagagatattcgctgtggtgcataaactttcatatgcaacgcatgaatataaataaaataatatcgagatattatatagactgcttttttttattattcgcaaactcagtaataagctttactaatatattgcagctaaactgcttaccctgaatattcagggtaagcgtgagagttaaaaaaaattacagcggttgggtttgcgcttctaccacggccagcgccaccatgttgacgatacgacgcacgcttgcgatcggcgttaacacgtgaaccggtttcgccacacccatcagcaccgggccgacagtcacaccttcgctgctggaaacacgcagtaagttgtaactaatgcgggcagcttccatgttcggcatcaccagaatattggcggaacctttcaaagagctgtccggcatacggtcgttgcgaatcgcttccaccagcgctgcatcgccgtgcatttcaccatcaatcatcagttctggtgcacgttccctgaccagttccagcgcctgacgcattttgctgctgctcgggcagtcagaagaaccaaagttggagtggctcaacaaagcaacgcgcggctcaataccaaaacgacggacagtttctgccgccatcaaggtgatctccgccagctcttctgcatccggttcatcattaacatatgtatcggcaataaaggtgttaccactcggcagcagcagcgcgttcatggcacctgcggtgtgaacgccatcgcgataaccaaagacatttttcaccacgctaaaatgttcatgataatcacccaccgtaccgcaaatcattgcatcggcttccccacgctgaaccatgatcgcgccgatcactgtcgggttactgatcagcgcccgctgcgcctgttcctgagtgacgccgcgacgcttcatgatctggaagtattcggtccagtactctttaaagcgcggatcggattcgttattgacgatctcaaaatcaacgcccgctttgatctgcaagcccagtttctgaatgcgcatttcgatcacgttcggacgaccgataaggatcggtttcgccagtcccagcgttaccagttcctgagtggcatgcagaacgcgcgcctcttccccttccggcagaacaacgcgcttcggcgctttgcgagcctgggagaaaatcggcttcataaacaggttggttttgtaaacgaactcagtcagcttgtcgatgtagacgtcgaaatcagcaatcggacgagtcgccacgccgctctccatcgcggctttagcgaccgcaggagcgatcttaacgatcaagcgcggatcaaacggctttggaatgatgtattccggaccaaagctcagatcctgatcgccatacgcactagccaccacttcgctctgttccgcatgggcgagttctgcaatcgcacgtaccgccgccagtttcatctcttcgttgatggcggttgcgccaacgtccagcgcgccacggaagatgaacgggaagcacaggacgttgttcacctggttcggatagtcagaacgaccggtgcaaatgatggcatccggacgcacttctttcgccagcggcggcagaatttccggttccgggttcgccagcgccaggatcattggcgcacgagccattttcttcaccatttcctgggtcagcactttcgggccggaacagcccaggaaaatatccgcgccttcaatcacatcatcgagggtacgtttgccgtcatccaccaccgcatatgcggctttggtttccgccatgtttggctcacggccctgatagataacgcctttactatcgcaaaccacgatgttatgtttttgcagacccagcgctaccagcaggttcatacaggcgattgctgcggcacccgcgccggaaaccaccatccgcacgtcggagatgtttttctccaccacgcgcaagccgttgaggatggcggcagtgctgataattgccgtgccgtgctgatcgtcgtggaataccggaatattcatccgctcgcgcagtttctgttcaatatagaaacattctggcgctttaatgtcttcgaggttgatgccgccgaaggttggttcgagcgcggcgacaacttcaataaatttgtccgggtcgagttcgtcaacttcaatgtcaaatacatcaatcccggcgaatttcttaaacagaacgcccttgccttccatcaccggtttgcctgccagcgcgccaatgttgcctaaccccagcaccgccgtaccgttagagatcaccgccaccaggttacctcgggcggtatatttgtaggcttttaacgggtctttttcgatttcaagacaaggtgcggcaacgcctggactgtaggccagcgccagatcgcgctgtgttgccagaggcttggttggagaaacctggattttccctggaactggaaattcatggaaatcaagtgcactttgttttaactggtcatccatttggttgttcctttcacgtaacgttcacaaataaagtgtgtgggcaacagcccctgcccacaacgtggcgcacattattaccctgccggagtctacagactttgagcaagtccaaactctcaccattaatataatgttttggtaataatcctataacactgatgttacctgcttaatccagcaataccatgcctgtctgctatgcttttttgatgcgtttagcgaaatttctcagaagtgtgaattaacgcactcatctaacactttacttttcaaggagtatttcctatgaacgagttagacggcatcaaacagttcaccactgtcgtggcagacagcggcgatattgagtccattcgccattatcatccccaggatgccaccaccaatcctagcctgttactcaaagctgccggattaagtcaatatgagcatttaatagacgatgctatcgcctggggtaaaaaaaatggcaagacccaggaacaacaggtggtcgcagcgtgtgacaaactggcggtcaatttcggtgctgaaatcctcaaaatcgtacccggtcgcgtgagtacagaagttgatgcacgcctctcttttgataaagaaaagagtattgagaaggcgcgccatctggtggacttgtatcagcaacaaggcgttgagaaaagtcgcattctgatcaagctggctagcacctgggaaggaattcgcgcggcagaagagctggaaaaagaaggtattaactgcaacctgacgctgctgttttcttttgcacaggcacgggcctgtgcggaagcaggcgtttttctgattagcccgtttgtcgggcgtatttatgactggtatcaggcacgcaagccgatggacccgtatgtggtggaagaagatccgggcgttaaaagcgtgcgcaatatctacgactactataagcaacaccactatgaaaccattgtgatgggcgcgagcttccgtcgcaccgaacaaatcctcgccttaaccggctgcgatcgactgactatcgcaccgaatttactgaaggagctgcaggaaaaagttagcccagtggtacgtaaattaatcccaccttctcagacgttcccacgcccagctcccatgagcgaagcggagttccgttgggagcacaatcaggatgcgatggcggtagaaaaactgtctgaaggcattcgtctgttcgccgttgatcaacgcaaactggaagatcttcttgccgccaaactataaaccagccacggagtgttatatgtcccgaaaagaccttgccaatgcgattcgcgcactcagtatggatgcggtacaaaaagccaactctggtcatcccggcgcgccgatgggcatggctgatattgccgaagtgctgtggaacgattttcttaaacataaccctaccgacccaacctggtatgatcgcgaccgctttattctttccaacggtcacgcgagcatgctgctctacagtttgctacatctgaccggttacgacctgccgctggaagaactgaagaacttccgtcagttgcatagcaaaaccccaggccacccggagattggctatacgccaggcgttgaaaccaccaccggcccgcttggacaaggtttggcgaacgccgtcgggctggcgatagcagagcgtacactggcggcgcagtttaaccagccagaccatgagatcgtcgatcacttcacctatgtgtttatgggcgacggctgcctgatggaaggtatttcccacgaagtctgtagcctggcaggcacgctgggactgggcaagctgattggtttttacgatcacaacggtatttccatcgacggtgaaacagaaggctggtttaccgacgatacggcaaaacgttttgaagcctatcactggcatgtgatccatgaaatcgacggtcacgatccgcaggcggtgaaggaagcgatccttgaagcgcaaagcgtgaaagataagccgagcctgattatctgccgtacggtgattggctttggtagcccgaataaagcaggtaaggaagaggcgcacggcgcaccactgggggaagaagaagtggcgctggcacggcaaaaactgggctggcaccatccgccatttgagatccctaaagagatttatcacgcctgggatgcccgtgaaaaaggcgaaaaagcgcagcagagctggaatgagaagtttgccgcctataaaaaggctcatccgcaactggcagaagagtttacccgacggatgagcggtggtttaccgaaggactgggagaaaacgactcagaaatatatcaatgagttacaggcaaatccggcgaaaatcgctacccgtaaggctagccaaaatacgcttaacgcttacgggccgatgctgcctgagttgctcggcggtagcgcggatctggctcccagcaacctgaccatctggaaaggttctgttagcctgaaggaagatccagcgggcaactacattcactacggggtgcgtgaatttggcatgaccgctatcgccaacggcatcgcgcaccacggcggctttgtgccgtataccgcgacgttcctgatgtttgttgaatacgcccgtaacgccgcgcggatggcggcactgatgaaagcgcggcagattatggtttatacccacgacagtattggcctgggcgaagatggtccgacgcaccaggctgttgagcaactggccagcctgcgcttaacgccaaatttcagcacctggcgaccgtgcgatcaggtggaagcggcggtgggctggaagctggcggttgagcgccacaacggaccgacggcactgatcctcagtaggcagaatctggcccaggtggaacgtacgccggatcaggttaaagagattgctcgtggcggttatgtgctgaaagacagcggcggtaagccagatattattctgattgccaccggtagtgagatggaaattaccctgcaagcggcagagaaattagcaggagaaggtcgcaatgtacgcgtagtttccctgcccagcaccgatattttcgacgcccaggatgaggaatatcgggagagcgtgttgccttctaacgttgcggctcgcgtggcggtggaagcaggtattgccgattactggtacaagtatgttggtctgaaaggggcaattgtcgggatgacgggttacggggaatctgctccggcggataagctgttcccgttctttggctttaccgccgagaatattgtggcaaaagcgcataaggtgctgggagtgaaaggtgcctgatggtgattgccggatgctgattgccggatgcgacgctgacgcgtcttatccggcctacagcgtcttatccggcctacatgtcccgccattttgtttaacgggtgatccacaacgtgggccaggcgtctggcccatgccagttatcgcaggtgggttctgcggcgtaacgcaccaggcgaaaacgctgaccgtcaaagcgccagcgcgcctgaatgccacaatcgcttaatccgcgccctttcgctaaggtcaccagttcacggcttttctcatcaaatgttgcgttcatcagttccagttcattcgtctcctgaccgttgttgaacggcaaacgcaaccgaaccgggcggctagctagtggctttttacggctcacaatccatgccaaatcaatggtgttataggcccctgcctcacagctaatcatcatcagcgctttatcatcagtcagcgcagtgacattcacctcacgacgcaatggatcaaggctgcagcgcagaccattcatccgccagtttccataatccagcaaatcgttgcgttcttcgagactgagtggcgtcggcgttgggttaaccaccgcgacctctttcagcgcaggcgcgggcggtacgctgagcggcggttcgtcccctttcttgatccacgcggtttcactgccaacgcgcttttgctgagcatcaataaacaacaacgctgcttttaagccactcagagaaatggtctgatcgccatcgcgtaaggtgattgccttcccttcctgaatcatctgcaaaaacgcggtgatggttgccgtatcatcggttactaataaccatggactaatccgccacttgtcaccacttaacgccaacggctcgccatctaacagcagccgtggcgctatctccccttcactcgcctccgggctcttcaatccgccgcgctcaatacgtaaaacggcatcggtatgcgccccggcgctgcggctcagggtcatcaccagtccattatgatcgcccgtattacgcgccacgcagaaattttggttattacaggtgacctgccagtcggaaaacgcccgttgcgctggtgccgcccacaccaaagacgtcggcaacaaagcgaaaaaaaagagaaggaaaatgcgatagcgcatggacggtacgaccccagaagttcaaacaaacagcacaagtcgtatcttcgttgcgcaggtagcgcggctcaatcggatttgtcggattgagccaataataaacaacgaaatattattgttatttttcagtccattaaatgactcgtttgcaaatagttaagcaataacaccgtcttaccgtcacgtatctcgccggttttgatcatctccagcgcctggctgaacggcagctcgagcacttcaatatcttcatcttcgacaccgccaccggcgttagcgcgctgattgtcactgtattcggcgataaaaaagtggattagctcagtcacaccgcctgggctcatatacagttcaaataatttgcgcacttcacccacttcatagcccgtctcttcaatcgcttctttgcgaatacacacttccggttcgtcgttatccagcagcccggcgcagctttcaatcagctgcccgctttcattgccattaacccaggtagcgacacggaactgacgaatcagaaccacggtctttttcttcgtgttgtacaggaggatcgtcgcaccattgccgcgatcgtacacttcacgtttatggcggataacttcgccgtctttgcgcgtgagatcgtaagtaatgttgtgcagggtgaaatagttatcggagagaattttgtctttaatgagggtgatttgttgcgtcataccgactccacagcgcgaaatgaacaattatcttacgctgtgaagtcgggtttgtctgcgcaggctatcagtgagatttgacactttttacccccagccagtcaataatcccctgtgccgcatgacgtccttctgccattgcggtaaccaccagatccgcaccacgcacggcgtcaccaccagcgaagattttcggattggtggtctggtaacggtactggctttccacatccgcgatgatgcggccccatttgtctaccgttacaccgtggctctccagccacggcatcccgtgcggattgaagccaaacgccataatcaccgcgtcggctggcatgacaaattcactgccttccaccggcactggacgccgacgcccctgggcatccggctctccaagacgcgtgcgcaggaaacgaatcccgcagacgtgaccttgttcattcagctcaagcgccaccggctggacgttaaattcgaagttggccccctcttcgcgggcgttcttcacttctttcttgctgcctggcatgttagcttcatcacgacgataagcgcaggtgacgttactcgcgccgtggcgcagtgcggtacgcacacagtccatcgcggtgtcgccgccgcccagtaccacgacgttaagtccggcggtattgataaacggctcttccggtagctcttcgagccccatcacctgtttagtgttggcaatgaggaacggcagcgcgtcataaacgcccggcgcatcttcattgggtaaacccgctttcatggaacggtaagtgcctacgccaacgaagaccgcgtcgtattgttccaaaaggctatccaaagagacatctttacccacttcacaattgagttcgaagtgaatccccatcgcgctgaagatttcccgacggcgtgccagcagggatttatccagtttgaaagaaggaatgccgaaagtgagcaagccaccgatttctggatggcgatcgtacaccgtcacccccacgccattgcgggtcagaacatccgcacaggccagccctgccggacctgcaccgataatcgccacccgcttgtccactttggtgacatggcttaagtcaggacgccaacctttcgccaacgcctgatcactaatgtagcgttcaatgttgccgatagttaccgcgccgtgctcatcgcgaatagtacaggcaccttcacacaaacggtcttgcggacaaacgcgtccggtaatttccggcagggtgttggtctggtgagaaagctcgacggcggcgtcgatgtttccggctttcaccagttcaatccactgcggtatatggttatgcagcgggcaggtccattcacaaacgctgtgctcgccgcacttaaggcagcggctggcttcccgttgtgcctggtcggcgcgaaatggcagataaatttcatcaaaaccggttttgcgcgcttcaatcgccagtttatccgactcgccacgcgcgggcgttgcctgcatttgttcgactttactcattaccggcatttcttgcgccgcggtactggcatgccacggttgatgttcctgacgcgcggtgcgcaagcggcgggatttcgccatgccggagagtgcgacgtcagtgaccagttgcagcgcgtccgccgggcaattctcaacacaggcaggaccgttttcgcgccccgcacaaaggtcgcatttatgcgccgtggcttttacttttcctgccgcgacgggtgtcaggacgatttgcatcgtaccaaaaggacaggccaccacgcaggatttacagccaatacacttttgctgattgacctgaatgctgtcatcaacgtggctgattgcgccattagggcagctacgggcgcagggcgcatcttcacaatggtgacaggtcactgcactacgttgctgttgatgtttgataaccgtaattcggggatgaaaatggtgttggctcaggacatgttgctcatcattgtgagccatgacacaggcgatttcacaagcatgacaacccagacattgctgactgttggccataataaaacgattcataacgaccttcttttttggttgtaaaaaccttattctttatatgagtgttgttattacccgacttacaggggaatcggcaatgttcatgtgcccagaataagtaactatttcgctataaactgtggcagatcaaataatcccatcactgactaaattgcgtttcagcgaactggaacattaatgattttttgtggagaagacgcgtgtgattgttaaacgacccgtcagcgccagtctggcccgggcctttttttacattgtgctgctgagcattctttccacgggtatcgctctgctaactctggcgagcagtttgcgcgacgctgaggctatcaatattgccggaagcctgcgtatgcagagttaccgcctgggctacgacttgcaaagtggcagtccacaactcaatgcacatcgccagttatttcagcaggcactgcatagtccggtattaaccaacctcaacgtctggtatgtgccagaagcagtaaaaactcgctatgcgcatctgaatgccaactggctggagatgaataatcggctcagcaagggcgatttgccgtggtatcaggccaatattaataattatgttaatcagatagacctgttcgtactggctttacagcactacgctgaacgcaaaatgctgctggtggtggcgatttccctggctggcggcatcggtattttcacgctggtcttttttactttgcgccgcatacgccatcaggtggttgccccgctgaatcagctggttaccgccagtcagcgtattgaacacgggcagttcgacagcccgccgctggataccaacctgccgaatgagcttggtctgcttgcaaaaacctttaaccagatgagcagcgagctgcataaattgtaccgtagcctggaagcgagtgtagaagaaaagacccgcgatctccacgaggccaagcgtcgtctggaggtgttgtatcagtgtagccaggcgctgaacactagccagattgatgtgcattgtttccgccatattttgcagattgttcgcgacaatgaagcggctgaatatctggagttaaatgtcggtgaaaactggcggattagcgaagggcaaccaaacccggaattgccgatgcagattttaccggtgacaatgcaagagacggtttacggcgaactgcactggcaaaatagtcacgttagtagtagtgaaccgctgcttaacagcgttagcagcatgctgggacgcggtttgtactttaatcaggcgcagaagcattttcagcaattattgttgatggaagaacgtgcgaccatcgcccgcgaattgcacgacagcctggctcaggtactttcttacttacgtatccagttgacgttactgaagcgtagcataccggaagataacgccaccgcacaaagtatcatggccgatttttcccaggcgttgaatgatgcttatcggcagttacgcgagctgttgactactttccgcctgacgctgcagcaggcggatctcccctccgcattgagggaaatgctggatacgttacaaaatcaaaccagcgccaaactgaccctcgactgccgtctgccaaccctggcactggatgcgcaaatgcaggtgcatttgttgcaaattattcgcgaagcggtgctgaatgcgatgaagcacgccaacgccagcgaaatcgccgtcagttgcgtcaccgcgccggacggcaatcacacggtttatatccgtgataacgggattggtatcggtgaaccgaaagaacccgaaggtcattatggtctgaatatcatgcgcgaacgcgcggaacggctaggtgggacgctgacttttagtcaaccttccggcggcggcacgttagtgagtattagctttcgctctgcggagggtgaggaaagtcagttaatgtaatgcctcctactgaccaaagaatacttgcacttaaggttcagtataaaagggcatgataatttacattaactcctttttttctccacgattggctcgtaccttgccgctacagtgaagcaagtcaagcctacaacgatacgcagaaacacgaggtcctcttttaatggcgaatttctttattgatcgccccatttttgcctgggtgctggcaatcctgttgtgtctgacaggtaccctggcgatttttagtttgcccgttgaacaataccccgatctcgcgccaccgaatgtgcgagtgaccgctaactatcccggcgcaagcgcccagacgctggaaaacaccgtgacccaggttatcgagcaaaatatgaccggcctcgataatctcatgtatatgagttctcagagcagtggcaccggtcaggcatctgtcactttaagttttaaagcaggcaccgatccggacgaagccgtgcagcaagtacaaaaccagctgcaaagtgccatgcgaaagttaccgcaggcggtgcaaaatcagggcgtgacggtgcgtaaaaccggcgataccaacattctgaccattgccttcgtctctaccgatggtagcatggataaacaggatattgctgattatgttgccagtaatattcaggacccgttaagccgcgtgaatggcgtcggggatatcgatgcctatggtagccaatattccatgcgtatctggctggacccggcgaaactcaacagtttccagatgacggctaaagatgtcactgatgccattgagagtcagaacgcgcagattgcggttgggcaacttggtggtacaccttccgtcgataagcaggcgctcaacgccaccattaacgcccagagtctgctgcaaacaccagaacagttccgcgatatcaccttgcgggtcaatcaggacggcagtgaggtaaggctgggcgatgtcgccaccgtcgaaatgggggcggagaaatacgattatcttagccgcttcaatggtaagccagcctccgggctgggggtaaaactggcctccggcgctaacgaaatggcgacagcggagctggtgctcaatcgtctcgacgagctggcgcagtatttcccgcatggactggaatacaaggtggcgtatgaaaccaccagctttgttaaagcctccattgaagacgtggtgaaaacgctgctggaagctatcgctctggttttcctcgttatgtatctgttcctgcaaaacttccgcgccacgctgatacccactatcgccgtgccggtggtgttgatgggaaccttctccgtactttacgccttcggttacagcgtcaacaccttaaccatgttcgcgatggtgctggcgatcggtctgctggtggatgacgccatcgtggtggtggaaaacgtcgaacgtattatgagtgaggaaggactcactcctcgcgaagccacacgtaaaagcatggggcagatccagggggcactggtcgggattgcgatggttcttagcgcggtatttgtaccaatggccttcttcggcggcaccaccggtgccatctatcgccagttctctattaccattgttgcggcgatggtgctgagtgtactggtagcgatgatcctcactccggctctgtgtgccacactacttaagccactgaaaaaaggtgagcatcatgggcaaaaaggcttttttgcctggtttaaccagatgtttaaccgcaacgccgaacgctacgaaaaaggggtggcgaaaattctccaccgtagcctgcgctggattgtgatttatgtcctgctgcttggcggcatggtgttcctgttcctgcgtttgccgacgagcttcttaccgctggaagaccgtggcatgtttactaccagcgtacagttgcccagcggtagtacgcaacaacagaccctgaaagtcgttgagcaaatcgagaaatactacttcacccatgaaaaagacaacatcatgagcgtgtttgccaccgttggttctggccctgggggtaacgggcaaaacgtggcgcgaatgtttatccgcctgaaagactggagcgaacgcgacagtaagaccggcaccagctttgccattatcgagcgtgcaacgaaggcgtttaaccaaattaaagaagctcgcgttatcgccagcagcccgccagcaattagcggtcttggtagttctgcaggttttgatatggagttgcaggaccacgctggagcgggtcacgatgcgctgatggcagcacgtaatcagttgctggcgctggcggcggaaaacccggagctaacccgtgtgcgccataacggcctcgacgacagtccgcagttgcagattgatatcgaccagcgtaaagctcaggcgctgggcgttgctatcgacgatattaacgacacactgcaaaccgcctggggtagcagctatgtgaatgactttatggatcgcggtcgcgtgaagaaagtctatgtgcaggcagctgcgccgtatcgcatgctgccagatgacatcaatctctggtatgtccgaaataaagatggcggcatggtgcccttctctgctttcgcgaccagtcgctgggaaacaggcagcccgcgtctggaacgctataacggttattctgcggttgagattgttggggaagccgcaccgggggtcagtaccggtacggcgatggatattatggaaagcttagtgaagcagctgccaaacggctttggtctggagtggacggcgatgagctatcaggagcggctttccggcgcgcaggctccggcgctgtacgccatttccttgctggtggtattcctgtgtctggctgcgttgtatgaaagctggagcgtgccgttcagcgtaatgctggtcgtgccgctgggggtaatcggcgcgctgctggcaacctggatgcgcgggctggaaaacgacgtttacttccaggtgggcctgttaacggtcattggtttaagcgcgaaaaacgccatcctgatcgtcgagtttgctaacgagatgaaccaaaaaggccacgacctgtttgaagcgacgctccacgcctgccgtcagcgtttacgcccgattctgatgaccagcctggcatttatcttcggcgtattgccaatggcaaccagcacgggtgccggttccggtggtcagcatgcggtgggtactggcgtaatgggcgggatgattagcgccactattctggctatttacttcgtgccgctgttctttgtgctggtgcgccgccgcttcccgctgaagccgcgcccggaataagcaataaaaaaggcgacatgccaatgtgtcgcctttttcaactttccgattaagaacctgctcagcgggttcttgctgtttgtactttgtctcaggaattacttacgaagcataacttcgataaagtctttccagttccccagttcacgttcaatcataacaacctctcttataattatgggtattctacggaaacaatataccgtggtgaagctaatttactcgattgctgcgatgactacctccgggggacaaatcttatgtaaatactatggtcctgcggtgatgatttgtatgtgatacacagcaacatttcgagatattcatacggcatctaatactgatttaattctggttaaaatacagacagataacaagatgaatattcttaatgtttacgttaaaaatgtttaatattatttaatagttgttaatttgaatacttcgataatgttatatttcctgataatcatttgcaggcaaaatgttttcacccttaaatgagtatttattctcataaatcgaaaaaggattcattatggttacactttacggtatcaaaaattgtgacaccattaaaaaggctcgccgttggctggaagccaataacatcgactatcgttttcatgattaccgcgtcgatgggctggacagcgaattattgaacgattttatcaacgaattaggctgggaagcgttactcaacacccgtggtacaacctggcgtaaactggacgaaaccacccgcaataaaatcaccgatgcggcctctgcggcggcattaatgactgaaatgcctgcaattatcaaacgtccattgctctgcgtgcccggtaagcctatgctgctgggtttcagtgattccagttatcagcaatttttccatgaggtgtaatctatgagctgcccggttattgagctgacacaacagcttattcgccgcccttccctgagtcctgatgatgcaggatgccaggctttgttgattgaacgtttgcaggcgatcggttttaccgttgaacgcatggactttgccgatacgcagaatttttgggcatggcgtgggcagggtgaaacgttagcctttgccgggcataccgacgtggtgccgcctggcgacgccgatcgttggatcaatcccccgtttgaacccaccattcgtgacggcatgttattcgggcgcggtgcggcagatatgaaaggcagcctggcggcgatggtggtggcggcagaacgttttgtcgcacaacatcccaaccatacggggcgactggcatttctgatcacctctgatgaagaagccagtgcccacaacggtacggtaaaagtcgtcgaagcgttaatggcacgtaatgagcgtctcgattactgcctggttggcgaaccgagcagtatcgaagtggtaggtgatgtggtgaaaaatggtcgtcgcggaagtttaacctgcaaccttaccattcatggcgttcaggggcatgttgcctacccacatctggctgacaatccggtacatcgcgcagcacctttccttaatgaattagtggctattgagtgggatcagggcaatgaattcttcccggcgaccagtatgcagattgccaatattcaggcgggaacgggcagtaacaacgttattccgggtgaactgtttgtgcagtttaacttccgcttcagcaccgaactgactgatgagatgatcaaagcgcaggtgcttgccctgcttgaaaaacatcaactgcgctatacggtggattggtggctttccgggcagccatttttgaccgcgcgcggtaaactggtggatgcggtcgttaacgcggttgagcactataatgaaattaaaccgcagctactgaccacaggcggaacgtccgacgggcgctttattgcccgcatgggggcgcaggtggtggaactcgggccggtcaatgccactattcataaaattaatgaatgtgtgaacgctgccgacctgcagctacttgcccgtatgtatcaacgtatcatggaacagctcgtcgcctgatgagtggttctgcaagaggaaataagcatggactggctggctaaatattggtggattctggtgattgtctttttggtaggcgtcctgctgaacgtgattaaagatctcaagcgcgtcgaccataagaaatttctcgccaacaagccggagcttcccccgcatcgtgatttcaacgataagtgggacgatgacgacgactggccgaaaaaggatcaaccgaagaagtaagctgagtgctcaaccgtaggccggataaggcgttaacgccgcatccggcaatggtgaacgatgcctgatgcgacgctcacgcgtcttatcaggccaggtaatctgtcttttacatcatttcaatcacatcatcatcgccaggcttaccgccacttagcgcttcgtcgaaataatgtttcggaatggtataacgcaagtgatccagggcaaattgcatactgcgattgtcgatcgcatggcctaaatcctccacgatatccagcgtcacgtcaccaccggcactgattaacgcttcctgcgccgcaaccgcatgcgccagatcgataaccggatcttcaccgccatgaatcaggtgaattgtcgtggctgtagacgcagtttccggcaggctcgcatagcgtccgttaaaagcaatgacgcgactagcaaggcccggttcggctttaatgctctccagcaccataatcgcgccttgagagaaaccgatgagcgccgtggcgttagcccctactccgctctgtttctgccagtagcgcaccgtttcaataaacgtcggcatgatcgcatccacacgcgcctggcgattatcttccgtaataccctgcacgctaaaccactgacgccccgccggattaccgctcggctccgcgccaccgacactcaccaccagcgcatcaggaaacagcggtgcaaaccagttgcctatttcccccattgccaccgggttatccccgacaccgtggaaaagcagtaacaactgttgcgcaggtttatccgggctttgaacaacaaaatggtcatgtttcatggcgaactccttaactgatgtcattaattttacgccgctgactcacaatgaccatgagataaaattgaaggagtcagtgaaataattgccattgcgttatgcgatcgcgcagacgctcagtgcgaacatcattaagtgcgaacagcgcctgcgcggcctcttcccgctgacggaccagtaacatcttgcggccactaagtttaagtgtggtacataactgcgcatcactggcgtttttctgtaaacgcccacgcagcgccggtaatgccagttcactggtttgtaacagacgcaataagcaacctaagctcgttaatagcggacgatgagcgaaagcaaaaccggccagttcaagccagtcgtcgtcagaaaggacggcatcgtttagtggatcaacaggaagcgtttcgccattccactgcgcgagagcttgcgcatcgcgacgtaaacggtaatgctcacgttcagccagctgtttacccgcatcactcatcggtaacagcgccatcgccgtatagcaaccgctgctggcttcccgatgattacccatccgcaccagcacaaaaccgcagcgttgccagaaacgccataactccccggtgtaaccaaaactcacgctaagatagtcgaggtcttgcgtatattgcaaagcaccagcaataagttgccgccctgtgccttcccgctgacgagccggatgaactgctatccggctgacccgccgtccacgcaatgtcgccgccagtggattgttgccgtgcgccgccaggctctgggccaccagattaccccgcgggcgacgaaaacctgcccataccgcctgactgagttgttgagataatccaccctcatccaccagccacagcgccccggcaatctcgttttcgccagccgcctgtaaaaaatgttgccctggtgcatccatcatccggcgtaaatccagcgggctagtccgatagtgcgcaccagacaagagctgataaacctttaacggcgtttctggatcgctttgccataacgtctgttcaaatgcggaaatgacaatattgccttgtggtgtatgggtgaagttttcatcgtcaaaaaccagtgcctcgctgaccattttttccagcgggcatccctgcgcccagcggatcggctgttgcagttcaaaacggtgtaaatgcggaaagcgagcgcaaaatttcagcaaaaaaccacgtccggtgccttcgtagccctgcaccgtagtggttaacaacgttcgaggaaaacggcttaccagttgatgcaacaatggcgcaggtatggctgcggcttcatcgaccaccagccagtcggcttgctcatcgctggctaacaaggcatccggcgcaataaagcgaaacttctcgcccgcaaattgtgccagtacatccgtactcgcttttgcgggcgcggtgacaatcgctctgcccgcaatacgagaaatgagttgccctgccaacgcgctcttaccgcgcccacgcgcagccgttaccgctgccacgcccggcggcatggtcattagctgctttaagagttgctgttgttctggttgtggtgcgccagtcgcggggtaccagtcagtacggggagtaaaatgcgccaagctgaatggctggttttgccgccagaggatagcctcgttatccgccgtaagtacgcgtttgagatgctggacaaaatgcggcgtcgcaatagggtcagggcaatcactccagcgcaggctgtcggcatcaggttggttttcccactcttcccatacagggagtaacaaaaccagccagcttcccgctttcaacgttccgctaagtgcggcaaaggcagcggcatcaaagccgtggcgggcgtcgaataccgcatgccggaactcgcgcccaagtaaagtttgtagtgcgctgggagaacagtggttttcagcatctggccgcgggctaatccacagccagtcgccaggtaaggcatcacgcaacttaagagtatgctcaaaacaccaaccctcttccccgctcaacaccagcaagcggcggatcccttcacgtttcatttgcgctgttaatgtgtgaagcgcagtcagttcagccatccctgccccggaagttaaatgcttttaccaaaagtattgcattgtgccggatcgccgctgtcgaaaccacgtttaaaccagctgtagcgttgctgagaagtgccatgagtgaaactgtctggtactactcgcccctgactttgctgttgtaaacggtcatcgccgatggcctgcgccgcgttcagcgcctcttccagatcgccggtttccagaacgccttgctgctgcatactatgcccccagacaccggcaaaacagtcggcctggagttccatacgcacagataagcggtttacttccgcctgcgtcgcgttttgttgcagttgacgaactttcggctcgatgcctaacagtttctgcacatgatgaccgacttcatgggcgataacgtacccctgggcaaaatcgccatccgcgccaagtttgtctttcatgtcatcatagaaggagagatcgatataaaccgtgccatccgccgggcaatagaacggccccattatggactggcccgccccgcagccggtacgcgtcattccacggtacatgaccagcttcggttgctgataggtcttacccatcttctcgaactgttgtccccaggtgtcttccgtggttgccagaatcacgctggtgaattttgcggcttcgtcttcatttgggctaatactccgcgtactttgttgttgggaaaccggctgcccggtcatcaacccggttaaatcaacaccatagtagcctgcaaccagcacgactatcagtaaaatcagcccgcctttaccgcttggcaggcgaaaaccgggaccgcccatagatggaccaccagagctgttgcgcctgtcttcaacattgtcactttcacgtcgcccttgccaacgcatagatacctcaacaatatattcattatagaaatgatcgtaggtggttcagaggaagattaccacaggaaagcgggatgaaatggcggaggaatgagcgttcaatgcatatattccgagagcggttgtcttgccgtgccagctgcacggcaagatgatgaacagaaaaatcagtccagctgtacacccaggcggcgggcgacggcttcataggcttcgatcaggccaccgaggctctggcggaaacggtctttgtccattttctccagcgtttctttgtcccacaggcggctaccgtccggggagaactcatcacccagtaccacttcgcctttgtacagaccaaattccagcttgaagtcgaccagaatcagaccagcatcatcgaacagttttttcagcacgtcgttcgctttgtaggtcagctctttcatacgcgccaggttctctttgctcacccagccaaaggtttcgcagtaagattcgttgaccatcggatcgtgcatggcgtcgtttttcaggaacagatcgaacagcggcgggttcagctcaataccttcttcgattccaagacgtttcaccagagagccagcagcacggttacgcacgacacactcaaccggcaccatatccagctttttcaccagacattcggtatcggagagcagacgctccatttgagtcgggatacccgcttcagccagtttgctcataatgaagtagttgaacttgttgttcaccatacctttgcgatcaaactgctcaatgcgcgcgccatcccctgcactcgtatcattgcggaattcgagcaccaacaggtccgggttttccgtgctgtatacggttttcgctttaccacgatacaactcagcttgcttttgcatctttatcactcctgggtgtgaattaacgttttaaaatcttttgctgtctggtgtgccggatgttttgtcggatgcggcgtgaacgccttatccgaactacgtccgacaaacaaatttcgtgcgaattaccgctaaaatcgcgttttcctgcagacgcacacgtttgcgtatcatatcagaaaaaagggccggatgattccagccctgtatttttacttgctaaacgcagcctggaagacagctaccagcgcgtcgttctgactctgagtcagagtatgacctttcggatcgatgaactgtaggctgctgcggttatctaaatcgccaacctgcagtttatagtcaccggatgccaggcctggatcgctcgcgcccagttcctgccagtcgctgtcagacagcggcttataagttacggccatgttgccctggctacgggtgctgtcggtcactttcatgcccactttttccagcgccgctggcagacgttgccaaaccacattgaacggcccgcgtacgaccagcattggtaaaccggtgtcatcagctgcactttgtacgtccatagtggtggaggcacgattttgcgcagcgttcgcggcgtcagtggcagatttatccagaccggcggaaataacgttcatcatctccgtgctgtaacgctgcatggaagccgcgtctgcaaccggtttgcccgcctgttccaggttcagcagtttaaccgtaaccgcctgctgataaccctgcggcttaacagagatttgataacgaccacgatactgctcgtcttcgtccagacggttccattgtacccaatcggtggtcagtgtctgaccagcatcatcacgttgggtgatggtgtagtttttcgcctgcagcacgctaaccacctgcggccacagagtattgccacgaccattttccaccagcaaactagcggtatcgcccgtgaactgggtacgcgcgccagaaaccagtgccagcggctgggctggtggacgaatgtccagcgccttaccgacagcaccactaccgttggtcaccgggattgcataatcaccggaggtcaccggcaaaatcattccagccggggcatgaagctccgcaagcggtgccgcttccaggtaggcttcatcaccactgacctgacgcttatagcgactgtcagaactacaggcagcgagtaataaaacaaggctaacacccgcaacctttgccaggcggctcttttgaacagagtaagccatcaaatctccctaaactttacagcaaaccggcatgcttaagcgccgctctgaccgtctcacgaccactgtcggtgattggtgtcattggcaggcgcagcgtatcggtcgccacaagacccagttccttacatgcccatttcaccgggattggattgggttcgacaaatagtttgttgtgtaatggcatcagacgctgattaataacgcgtgcctcggcaaaatgcccttctgctgccagtttgcacatctgggccatatcacgcgctgcgacgttagccgtaacggaaataaccccatgaccgcccaattgcatgaagtccagcgcgctcgcatcatcgccgctcagcagaacaaaatcatcactaaccagctctttgatctggtttacacgcgttaagttccctgttgcctctttgattccgataatattttttactttcgccagacggcccaccgtttccgggagcagatcgcagccagtacgggacggcacattatacagaatttgcggcaggtcagtatgctcagcgatggctttgaaatgctgatacaaaccttcttggctcggacgattgtagtaaggggttaccgtcaggcagccgacgataccactgtcattgaagcgctgcgtcaggctaatggcttccgcagtagcgttagcgccggtcccggcaattaccggaatgcgcccatcagccagatccagcgtcatcatcaccacatcagcatgttcgtcatgatttaaggtagcggactcgccagtggtgccaacagaaacgatcgcgctagtaccgctggcgacatgataatcaatcagttttttcaagctagcccgacagacattacctttttcatccatcggagtaacaatcgcgacaatacttcccgtgaacatgggccatcctctgtgcaaacaagtgtctcaatggtacgtttggtatggcattaaaagcaagcagacagaaccgttctgattgttgtatgcatgtttttttatgctttccttaagaacaactcaccccttaaaggaataaccagtttgacactgagtagccaacattatctggtgatcactgcgttgggtgccgatcgccctggaattgtgaacaccatcacccgtcatgtcagtagttgcggctgtaatattgaagacagtcgcctggcgatgctgggagaagagttcacgtttattatgctgctttccggtagttggaatgccattactctgattgaaagtacgttaccgttgaaaggtgccgaactggatcttttaatcgtgatgaagcgcacgacggcgcgtccgcgtccgccaatgccagcatctgtctgggttcaggtcgatgtggcagactccccgcatttaattgaacgcttcacagcacttttcgacgcgcatcatatgaacattgcggagctggtgagccgcacgcaacctgctgaaaatgaacgggctgcgcagttgcatattcagataaccgcccacagccccgcatctgcggacgcagcaaatattgagcaagcgttcaaagccctatgtacagaactcaatgcacaaggcagtattaacgtcgtcaattattcccaacatgatgaacaggatggagttaagtaatgaatccactgaaagccggtgatatcgcaccgaaatttagcttgccggatcaagacggagaacaagttaatttgaccgacttccagggacagcgtgttctggtttatttctacccgaaagccatgacccccggctgtaccgtacaggcctgcggcttacgcgataacatggatgagttgaaaaaagcgggcgttgatgtgctgggtatcagcaccgataaacccgaaaaactctcccgttttgcggaaaaagagctgcttaactttacgctcctgtctgatgaggaccaccaggtgtgcgaacaattcggcgtctggggtgaaaagtccttcatgggcaaaacctacgatggcattcatcgcatcagcttcctgattgacgctgatggcaaaatcgaacatgtctttgacgatttcaaaaccagcaatcaccacgacgttgtgctgaactggctgaaagaacacgcctgattactttgctccattccgtgctggctgcgcttgcggccagcatacctcacttctcgtgatcaagatcacattctcgctttcccctgcgacacgggtgtcgaatccattttttgctgaacgttaatgaccatcatttttgtaccgttcagaatccagttaatacataacttattgaatatattgagttaatcagaatggcatcctttatgcaatatgaaatgcaatgtttcatatcattttcaaggagccgacatgaaccgctttgtggtggccgaaccactgtggtgtacaggatgtaatacctgtctcgctgcctgtagcgacgtgcataaaacgcaaggtttacagcaacacccgcgcctggccctggcgaagacgagtacaatcactgcccctgtcgtgtgtcatcactgtgaggaagccccttgcctgcaggtctgcccggtcaatgccatctctcagagggatgatgcgatccaactcaacgaaagcctctgtattggctgcaagctttgcgccgtggtctgcccatttggcgcaatcagcgctagtggaagccgtccggtgaatgcccatgcgcaatatgtttttcaggctgaaggcagtctcaaagacggcgaagaaaacgcgccaacacaacatgctttgctgcgctgggaacctggtgtccagaccgtcgcggtgaaatgcgacctgtgtgatttcttgccagaaggtccggcctgcgttcgcgcttgcccgaatcaggcgttacggctgatcaccggtgatagcctgcaacgtcagatgaaagaaaaacagcgccttgccgcaagctggtttgccaatggcggggaggatcccctttccctcactcaggagcaacgctaatggatgccctgcaattattaacctggagcctgattctctatctgtttgctagtctggctagcctgtttttactcggcctggacagactggctattaagctttccggcatcacaagcctggtgggcggcgtgattggcatcatcagcggaattacgcaattacatgctggtgtaactttagtcgcccgttttgcccccccttttgaatttgccgatttaaccctgcgaatggatagcctcagcgcatttatggtgctggttatctccttgctggtggtggtttgttctctctatagtttgacttatatgcgcgaatacgagggcaaaggcgcggcggcgatgggcttctttatgaatattttcatcgcaagcatggttgccctgctggtgatggacaacgctttttggttcatcgtgctgtttgaaatgatgagcctgtcttcctggtttctggtcattgccaggcaggataaaacgagcatcaacgctggcatgctctacttttttatcgcccacgccggaagcgtgctgataatgatcgccttcttgctgatggggcgcgaaagcggcagcctcgattttgccagtttccgcacgcttagtctttctccggggctggcgagcgcggtgttcctgctggcctttttcggttttggcgcgaaagccgggatgatgccgttgcacagctggttgccgcgcgctcaccctgccgcaccaagccacgctagcgcgttgatgtctggcgtaatggtcaaaataggtattttcggcatcctgaaagtagcgatggatctgctggcgcaaacgggtttgcctctgtggtggggcattctggtgatggcgatcggcgcaatctccgcgctcctgggcgtgctatatgcgctggcggaacaggatatcaaacggctgctggcctggagtaccgtcgaaaacgtcggcattattttgctggcagtcggtgtggcgatggtcggtctgagtctgcacgacccgctgctcaccgtggttggactgctcggcgcactgtttcatctgctcaaccatgcgctgttcaaagggctgctatttctcggcgcgggagcgattattagccgtttgcatacccacgacatggaaaaaatgggggcactagcgaaacggatgccgtggacagccgcagcatgcctgattggttgcctcgcgataagcgccattcctccgctgaatggttttatcagcgaatggtacacctggcagagcctgttcagtctaagtcgtgtggaagccgtagcgctacaacttgcgggtcctattgctatggtaatgctggcagtcactggtgggctggcagtaatgtgcttcgtaaaaatgtacggtattactttctgtggtgcgccgcgcagtacacacgctgaagaggcacaggaagtgccaaatacgatgatcgtcgccatgctactgctcgcggcactctgcgtattaattgcgcttagtgccagttggctggcaccgaagataatgcatattgcccatgcgtttaccaatacccctcccgccactgtcgccagcggaatagcacttgtacccggcacgtttcatacacaggtcacccccagtttactgttgctgttactactggcgatgcctttgctgcctggcctttactggctgtggtgtcgtagccgccgcgcagcgtttcgtcgcacaggagatgcctgggcatgcggctacggctgggaaaatgcgatggccccgagtggcaatggcgtgatgcagccgctgcgtgtggtcttttctgcgctatttcgtctacgacaacagctcgaccctacgctgaggctaaataaaggtcttgcgcacgtcaccgccagggctcagagcacagaacccttctgggatgagcgggtgatccgccccatcgtgagcgccacccaacggctggccaaagaaatacagcatctgcaaagcggcgactttcgtctctattgcctgtatgtggtcgccgcactggttgtgctgctaatcgctattgccgtctaaggaaatcaccatgagacaaactctttgcgacggatatctggtcatttttgcgttagcacaggccgtgattctgctgatgctaatcccactttttacgggtatttcccggcagatacgcgcgcgtatgcactcccgccgcgggccggggatctggcaggattatcgcgatatccacaaactgtttaaacgccaggaagttgcgccgacatctagtggtctgatgttccgcctgatgccgtgggtattaatcagcagcatgctggtgctggcgatggccttaccactgtttattaccgtttccccttttgcgggcggcggcgatctgatcacccttatctatcttcttgccctgtttcgttttttctttgctctttccgggctggataccggaagtccgtttgcgggagtcggtgccagtcgcgagttgacgctcggcattctggtcgaaccaatgcttattctcagtctgctggtattggcgctgatagcaggttccacgcatatcgagatgatcagcaatacgctggcgatgggctggaacagcccgctaaccaccgtactggcgttactggcctgtggttttgcctgcttcattgagatgggaaaaattccctttgatgttgctgaagcagaacaggaattacaggaaggcccgctgaccgaatattccggtgccgggctggcgctagcgaaatgggggctggggctgaaacaggtcgtgatggcaagtctgtttgtggccctgtttctgccctttgggcgcgcgcaagaactttctctcgcctgcctgctgactagtcttgtcgttacgctgctcaaggttttgctgatttttgtactggccagtatcgcagaaaacacgctggcacgcgggcgttttttactcattcaccatgtgacctggcttggcttcagccttgctgcgcttgcatgggtcttctggttaaccggtctgtaaggagcactgacggaatatggaaaatcttgctctgacgacgttattgctgccttttatcggcgcactggtcgttagctttagcccacaacgtcgggccgccgaatggggggttttgttcgccgcgctgaccacgctgtgcatgttgagtctgatctccgcgttttatcaggccgataaagttgccgtcacgttgacgttggtcaacgtgggggatgtggcgttgtttggcctggtcattgatcgcgtgagtacgctgattctgtttgtggtggtgtttctcggtttgctggtcacgatctactccacgggttatctgacggataaaaatcgcgaacacccgcataacggcacgaatcgttattacgcatttttactggtgtttatcggcgcgatggcgggactggtactctccagcacgctgctcggtcagttgttgttttttgaaattacaggcggctgctcctgggcgttgatcagttattaccagagcgataaagcgcagcgtagtgcactaaaagcgttacttatcactcatatcggcagcttggggttgtatcttgccgccgccacgctgtttttgcagaccggaacgtttgcgcttagcgcgatgagcgagttacacggcgacgcacgttatctggtttatggcggcatcctgtttgccgcgtgggggaaaagcgcccagctaccgatgcaagcgtggctaccggacgcaatggaagcgccaacaccgatcagcgcctatctccacgccgcaagcatggtgaaagtgggcgtttacatttttgcccgcgctattatcgacggcggcaatatcccgcatgtgattggcggcgttggcatggtcatggcactggtcaccattctttatggctttctgatgtatttgccacagcaggatatgaagcggttgctagcctggagcaccatcactcaacttggctggatgttcttcggcttgagcctctccatcttcggcagccggctggcgctggagggcagcatcgcctacatcgtcaaccacgcgttcgctaaaagcctgtttttccttgtagcaggtgcgctgagttacagctgcggcacgcgcttgttgccgcgtctgcgtggcgtattgcacaccctgccgttgccaggcgtgggtttctgcgtggcagcgctggcgattaccggcgtgccgccgttcaacggcttcttcagtaaattcccgctgtttgctgccggttttgcgttgagtgtggagtactggatcctgctgcccgccatgattcttctgatgattgaaagcgtcgccagtttcgcctggtttattcgctggtttggtcgcgttgtgcctggcaaaccgagcgaggccgtcgccgatgccgcaccgctgccaggaagtatgcgcctggtgttgattgtactgattgtgatgagcctgatttccagcgtaatcgccgcgacctggttgcagtaaggagatgatgaatgaccggttctatgatcgtaaataatctggcgggactgatgatgctgacaagcctgtttgtgattagcgtcaaaagctatcgcctgagttgcggattttacgcctgccagagtctggtgctggtgtctattttcgccactctcagctgcctgttcgccgcagagcaactgctgatctggtccgccagcgcctttatcaccaaagtgctgctggtaccgttaatcatgacttacgctgcacgaaatattccccagaacatcccggaaaaagcgttattcggtccggcaatgatggcactgctcgcggcgttaattgtcctgctttgcgcatttgtcgttcagcccgtgaagctaccgatggctaccgggctgaaaccggcgctggcggtagcgttaggtcattttctgcttggcctgctgtgcattgtcagccagcgcaatatcctgcggcaaatttttggttactgcctgatggaaaacggctcccatctggtgctggcgcttcttgcctggcgagcaccggaactggtggaaataggtatcgctaccgacgccatcttcgccgtcattgtgatggtgttactggcaagaaaaatatggcgtacccacggcacgctggacgtgaacaacttgaccgcgctgaagggataatgagatgagttattctgtgatgttcgctttactcctgctcacgccgctgctttttagcctgctctgttttgcctgccggaaacggagactttctgcgactcgcacggtgaccgtattacatagcttagggatcacactgctgctgattctggcactctgggtggtccaaactgccgctgatgcaggagaaatattcgctgcgggactgtggcttcatattgatggtctgggcggtttgttcctcgccattcttggtgtgattggctttctcaccggtatttacagcattggctacatgcgtcatgaagtggcacacggcgagcttagtcccgttacgctgtgcgattactacggtttcttccatctgtttttgttcaccatgctgctggttgttaccagcaataacctgattgtgatgtgggcggcgatcgaagccaccaccttaagcagcgcgtttctggtaggcatttacggtcagcgtagtagcctggaagctgcatggaagtacatcattatttgtactgttggtgtcgcttttggtctgttcggtaccgtgctggtatacgccaacgccgccagcgttatgccgcaggcagaaatggcgatattctggagcgaggttcttaagcaaagctccttgcttgacccaacattaatgctgttggcctttgtgtttttgctaattggctttggtaccaaaaccgggctatttcccatgcacgcctggctgccggatgctcacagtgaagcgccgagtccggtcagcgccctgctctccgccgtattgctgaactgcgcgctgttggtgctgattcgctattacatcattatttgccaagccatcggcagcgatttccccaaccggttgttgctcatcttcggcatgttgagcgttgccgtggcggcatttttcattctggtacagcgggacattaagcgtctgctggcgtactccagcgtggagaacatggggctggtcgcggtggagctaggcattggcgggccgctgggaatttttgccgcgctgctgcacatcttaaaccacagtctggcaaaaacgctgctgttctgcggttccggcaatgtactgctcaagtacggcacgcgcgatctcaacgtcgtctgtgggatgctcaaaatcatgccatttaccgccgtgctgtttggcggcggtgcgctggcgctggcagggatgccgcccttcaacatttttcttagcgaatttatgaccattaccgccggactggcacgtaatcacctgctgattatcgtcctgctgttattgctgttaacgctggtgctggcgggcctggtacggatggctgcgcgggtgttaatggcgaaaccgccgcaggccgttaaccggggtgatctcggctggttgaccaccagcccaatggtgattctgctggtcatgatgctggcgatgggaacgcatattccacaacctgtcatcaggatcctggcgggcgcttccactatagtcctcagtgggacgcacgatctgcctgcacaacgtagcacctggcatgattttttgcctagtggcaccgcatctgttagcgagaaacacagtgaacgttaatagtagcagtaatcgtggcgaagcgattctcgccgccctgaaaacgcagttccccggcgcggtgctggatgaagagcgacaaacgcctgaacaggtcaccattacggtgaaaatcaatctgctgcctgacgttgtacagtatctttattatcaacatgatggctggcttccggtcctgtttggcaacgacgagcggacacttaacggtcattacgcggtttattatgcccttagtatggaaggggccgaaaaatgctggattgtggtgaaggcgctggtcgatgccgacagtcgggagtttccgagtgtcacaccgcgcgtccctgccgcggtctggggcgagcgagaaattcgcgatatgtacgggctgattccggttggcctgccggatcagcgtcgcctggtgttgcccgatgactggccggaagatatgcatccgctgcgcaaagatgcgatggattatcgactgcgccctgaaccgacgactgattccgaaacgtatccgtttatcaatgagggcaacagcgatgcgcgggtgatccctgtcggcccgctgcatatcacctccgatgaaccgggtcacttccgcttgtttgtggatggcgagcaaattgtcgatgctgattaccgcctgttttatgtccatcgcggcatggagaaactggcagaaacgcggatgggctacaacgaagtgaccttcttaagcgaccgcgtgtgtgggatttgcggttttgcccacagtgtggcctataccaatagcgttgaaaatgcactggggattgaggtgccgcaacgagcacatactattcgcagcattctgctggaagtcgaacggctacacagtcatttgcttaaccttggcctctcctgccatttcgttggttttgataccggctttatgcaatttttccgcgtgcgggaaaagagcatgacgatggcggaattgctgatcgggagccgtaaaacctacggtctgaatctgattggtggtgttcgccgcgatattctcaaagagcaacgtctgcaaacgctgaaactggtgcgcgagatgcgcgccgacgtgagcgagctggtagagatgctgcttgctacgccgaatatggaacaacgcactcagggcattggcattctcgaccgacaaatcgcccgtgatttgcgctttgatcacccctacgccgactacggcaatattccaaaaacactgtttacctttaccggcggcgatgttttctcccgcgtgatggtccgtgtcaaagagacgtttgatagcctggcaatgctggaatttgccctcgacaacatgccggataccccactgctgaccgaaggctttagctataaacctcacgcattcgcgctgggctttgttgaagcgccacgcggtgaagacgtgcactggagcatgctcggtgataaccaaaaattgttccgctggcgctgccgtgccgccacctacgccaactggccggtgttgcgttacatgctgcgcggcaataccgtttctgacgcaccgctgattatcggtagccttgatccctgctactcctgtaccgaccgtgtgacgctggtagatgtgcgcaagcgccagagtaaaaccgtgccgtataaagagatcgaacgctacggcattgatcgtaaccgtagcccgctgaagtaaggacagaagatgctgaagttactgaaaactattatgcgcgccggaaccgcgacggtgaaatatcccttcgcgccactggaggtcagccctggctttcgcggaaaaccggacctgatgcccagccaatgtattgcctgcggtgcctgcgcctgtgcttgtccggcaaatgcgctggctatccagaccgacgaccagcaaaatagccgcacctggcagctctatctggggcgttgtatttactgcggacgttgtgaagaagtgtgcccgaccagagccatccagcttaccaataactttgaactgaccgtcaccaataaagccgatctctatacccgcgcgacgttccatctacaacgttgcagccgttgcgaacgcccgtttgccccgcaaaaaaccatcgcactggctgctgaattgttagcacagcaacaaagtgcgccacaaaaccgcgaaatgttgtgggcgcaagcgagcgtctgcccggaatgcaaacaacgcgcgacgctgatcaacgacgatacagatgtactgctggtggctaaggagcagctatgagtccagtgcttacacaacatgtcagccagcccatcacgctggacgagcaaacgcaaaagatgaagcggcatttgctacaggatatccgtcgcagcgcttacgtttatcgcgtcgattgcggcggctgcaacgcctgtgaaatcgaaatttttgctgccattacaccagtattcgacgcagaacgttttggcattaaggttgttagtagtccgcgtcacgccgatattttgttatttactggcgcagtcacccgggcgatgcgtatgcctgcacttcgggcgtatgagtctgcccccgatcataaaatttgtgtttcctacggcgcgtgcggtgtcggcggcggtattttccacgatctctacagcgtctggggcggtagcgacaccattgtccccattgatgtttggatccccggctgcccgccaacaccggccgccaccattcacggtttcgccgtggcgctcggtttgctgcaacagaagattcacgctgtggattatcgcgatcccaccggggtgactatgcaaccgttgtggccgcagatcccgccaagtcagcgtatcgccattgagcgagaagcgcggcggctggcgggctatcgtcaggggcgagaaatttgcgatcggctcctgcgccatttaagcgacgatcctacaggaaatcgggttaacacctggttgcgcgatgccgacgatccacgtctcaatagtatcgttcagcaactctttcgcgtactccgggggttacatgactgaagagtgcggggaaattgttttctggacgctgcgaaaaaagtttgtcgccagtagcgacgagatgccggaacacagctctcaggtaatgtattacagcctagctatcggccatcacgttggcgtgattgattgtctgaatgtcgccttccgctgcccactgacggaatacgaagattggcttgcactggtcgaagaggagcaagcccgacgtaagatgctgggggtgatgacttttggtgagattgttattgacgccagccacaccgccctgttgacccgggcattcgcgccactggcggatgacgcgacgtctgtgtggcaggcgcgtagcattcaattcattcatctgttggatgaaattgtgcaggaaccggccatctatctgatggccagaaaaattgcgtgagaaggatttctcattaataaggactgttgatggctatgagtgacgaggcgatgtttgccccgccacaaggaataacaattgaagcggtaaacggaatgctcgcggagcggttagcacagaaacacggcaaggcgtctttattacgcgccttcatcccgctgccgccgccgttcagcccggtacaacttattgaactgcatgttctcaaaagcaacttctattaccgctaccatgatgatggcagcgatgtgacggcaacaacagagtatcagggcgagatggtcgattatagccgtcacgccgtccttctcggcagtagtggaatggcggagctacgctttattcgcacccacggcagtcgttttacttcccaggattgcacactgtttaactggctggcgcggataatcaccccggttctgcaaagttggctcaatgatgaagaacagcaggtggcgctgcgtttgctggagaaagatcgcgatcatcatcgggtactggttgatattactaatgcagtgctgagtcatcttgatctcgacgatctgatcgctgacgtcgctcgtgagatccatcattttttcggtctggctagtgtcagtatggtactgggcgatcatcgaaagaacgagaagttcagcctgtggtgcagcgatctttctgccagtcattgtgcgtgtctgccacgctgtatgcctggcgaaagtgtattgctgacacaaacgctacaaacccgacaaccgaccttgacgcaccgtgcagatgatctgtttctctggcaacgcgacccgttattactcttacttgcatctaacggctgcgaatctgcgctccttataccgcttacctttggcaaccatacaccgggtgcattgttgctggcgcatacctcttccactctctttagtgaggaaaactgccagctactacaacacatagccgatcgcatcgctattgccgttggcaatgccgatgcctggcgtagcatgaccgatttgcaggaaagtttgcagcaagaaaaccaccagcttagcgagcagctccttagcaatctgggcatcggtgacattatctatcaaagccaggcaatggaagacctgctccagcaggtagatattgtggcgaagagcgacagtacggtgttgatttgtggtgaaaccggaactggcaaagaggtgatcgccagagcgatccatcaacttagcccgcgacgcgacaagccgctggtcaaaatcaactgcgctgccatccccgccagtcttctggaaagtgagttattcggtcatgacaaaggggcgtttactggtgcgattaatacccatcgtggtcgttttgaaattgccgatggcggcacgttgtttctcgatgaaattggcgatctgccgttagaacttcagcctaaactgctgcgcgtattgcaggagcgggagattgagcgtctcggcgggagtagaacgatcccggtgaatgtcagagtcattgccgccaccaaccgtgatttgtggcaaatggttgaagatcgccagtttcgcagcgatctcttttatcgcctgaatgtcttcccactggaattgccgccgctacgcgaccgtccggaagatatccctcttttagcaaaacatttcacgcaaaaaatggcgcgccatatgaatcgcgcaattgacgccatcccgaccgaggcactacgccagttgatgagctgggattggccgggcaacgtgcgcgagctggaaaacgtgattgagcgggcggtactgttgactcgtggtaacagtctgaatttacatctaaatgtccgacaaagccgtttactgccgacgctaaatgaagatagtgcgcttcgcagtagtatggcgcagttactgcacccgacgacgccagagaatgacgaagaagaacgtcagcgcattgttcaggtattgcgagaaaccaatggcattgttgccgggccccgtggcgcagcgacgcgattagggatgaagcgcaccacgctgctgagtcgaatgcagcggctggggatcagcgttcgcgaggtgttgtaatctgcttttgcaggagtatgcatgagaaacaaactctctttcgacttgcagttgagcgccagaaaagcggcaatcgctgaacggattgccgcccataaaattgcccgcagtaaagtgagcgtctttttaatggcgatgtccgctggcgtgtttatggcgatcggatttactttttacctttccgttatcgccgatgccccgtctagtcaggcattaacccatctggtgggcggcctttgctttacactcggctttattttgctggcggtttgcggcaccagcctgttcaccagcagcgtaatgacggtgatggcaaaaagtcggggcgtcattagttggcgaacttggctgattaacgcacttctggtggcctgcggtaatctggcaggtattgcctgtttcagtttgttaatctggttttccgggttggtgatgagtgaaaacgcgatgtggggagtcgcggttttacactgcgccgagggcaaaatgcatcatacatttactgaatctgtcagcctcggcattatgtgcaatctgatggtttgcctggcgctgtggatgagttattgcgggcgtagcttatgcgacaaaatcgtcgccatgattttgcccatcaccctgtttgtcgccagtggctttgagcactgtatcgccaatttgtttgtgattccgttcgccattgccattcgccatttcgcccctccccccttctggcagctggcgcacagtagcgcagacaattttccggcactgacggtcagccattttattaccgccaatctgctcccggtgatgctgggtaatattatcggcggtgcggtgctggtgagtatgtgttatcgggctatttatttacgtcaggaaccctgaaaaatcagcccggcgaaacagttcgtcgggctgaagattattcttgcgcgatttgcccatcgggccaggcatgaatcacggctttgatcagcgtcgccaacggaatggcgaagaatacgccccagaatccccacaaaccaccgaagatcaccacgcttaaaataatcaccagcggatgcaggttaaccgcttcggagaacaacaccggcactaacaggttgccgtccagcgcctgaataatcagatacaccgcgaagcagctccagaattcagtacctgcgccaaactggaatagcgccacgccaaccaccggaatggtcaccacaaatgcgccaatgtacggaataagaacgctgaagccgaccagcactgccagcagcaggctatagttcagcccgaagagcaagaaccccagccaggtggcgatccccaccacgatcatctccagcactttgccgcggatatagttggtgatttgttgattcatctccttccacacctgtcctgccagcccacggttacgcggcagcacccggcgaacggcgttcagcatctgctctttgtctttcagcaggaagaagaccatcaatggcaccagcaccagatagacggctatggtcagcaaaccgaccaggctggcgagggaaattttcaccacgctatcgcccatggtcagcatccgactgcgcatattttcggccattgcatcaataatgcccgcgtccattaacgccggatagcggcgcggcaacgtggcggcaaagtcagaaagcttattgagcatccccggcatatcgcggattaagtagatgccctgttgccaggcgataggcagtaccacgaacgccatcagtagcaatataccgacgaaaaccaccaatacaatgctcgtcgcccagcggcgggagcagccaatagattgcagacgcacggttggccattccagcaaataggccagcacaatagccaccagcaacggagcaagcaggccactaaagaaaaagataatgccaaatccggcaactaaaataaccagcaaggcaatcgcttccgggtcgctaaaacggcggcgataccattgcatcaacatttcgagcataaagaccttccctgaacctcaagagcgggattgcgatccgcaattgtatcgaaatgtcacaaaaaagacttcgctttttatgacggattcaggaaactgaaaagtcatttgagtgggctaatcttcgccgttacactcaaaggcggcgcggtgggaacgatatttcacagtatcggtcaaatgactatctccagaaatacaggatagaggttatgttcaggcagttgaaaaaaaacctggttgcaaccctcattgctgctatgaccattggtcaggtagccccggcgtttgccgacagcgcagacaccttgccggatatgggaacctccgcaggaagcacgctttccattggtcaggaaatgcagatgggcgactattatgtccgccagctacgcggcagcgcgccgttaattaatgacccgctgttaacgcaatatattaatagcctggggatgcgtctggttagccatgccaatagcgttaagacaccgtttcatttttttctgatcaacaacgacgaaattaacgcctttgctttctttggcggcaacgtggtgctgcactctgccctgttccgttattccgataacgaaagtcaactggctagtgttatggcgcacgaaatctcccacgtcacccaacgtcacctggcgcgagcgatggaagatcagcagcgcagcgcgccgctgacctgggtcggcgcgttaggttctattttactggcgatggccagtccgcaggcggggatggcggcgctgaccggtacactggcgggaacgcgtcaggggatgatcagtttcacccagcaaaatgaacaggaagcggaccgcattggtattcaggtgctgcaacgcagcggattcgatccgcaggcgatgccaaccttcctcgaaaaattactcgatcaggcgcgttactccagccgcccgccggaaattttattgactcacccgttgccggaaagtcgtctggcagatgcccgcaaccgtgctaatcagatgcgcccgatggtggtgcagagcagcgaagatttctatctggcgaaagcgcgcacactggggatgtataattccggacgtaaccagctcaccagtgatttgctggatgaatgggcgaaaggaaacgttcgtcagcaacgagcagcacaatatggtcgtgctttacaggcgatggaagccaataaatacgacgaggcgcgtaaaacgctgcaaccgttactggcggcagaacctggcaacgcatggtatctcgatctggctactgatatcgatcttgggcaaaacaaagccaatgaggcgatcaatcgtctgaaaaatgcccgcgatttacgcaccaatccggtgttgcagctcaacctggcgaacgcttatttgcaaggcggtcaaccacaagaagcggccaatattctgaatcgctacacctttaataataaagatgacagcaacggctgggatttgctggcacaggcggaagccgcgctaaataaccgcgatcaggagctggctgcgcgagcagaaggttatgcgctcgccggacgactcgatcaggccattagcctgttgagtagcgccagtagccaggtgaaattaggcagcctgcaacaagcgcgttacgatgcgcgcatcgaccagttgcgccagctgcaggaacgctttaagccttataccaagatgtaattcgcattaaaggaagaacaatgaccaaacaggtaaaaatctaccataacccacgctgtagtaagagccgggaaacgctgaacctgctgaaagaaaacggcgtggagccagaagtggtgctctaccttgagacacccgccgatgcggcaacgctgcgcgatttgctgaaaatactggggatgaatagcgcccgtgaattgatgcgccagaaagaggatctttataaagaactgaacctggctgacagtagccttagcgaagaggcgctgattcaggcaatggtggataatccgaagctgatggagcgcccgattgtggtcgcgaatggcaaagcgcggattggtcgtccaccggagcaggtactggaaatcgtgggttaagatgtgctccatcgctagttgaagcacattgccggatgcgacgcttgccacgtcttatccggcctacgaatactatggattaacttcgcgtagttcggataaggcgttcgcgccgcatccgacaataaacaccttatttacaacttcagaatttctttcacaaacggaatggtcagcttacgttgcgcggtaatgctcgcacgatccaactgatccaacgtcataaatagcgtgcgcatttctctgtcgagccgcttcagcaagaaacgccccacatcttccggcagttcaaaaccacgcaaacgcgcgcgtaactgtagcgcctgcaacttatcttcatcagaaagtggctgcaatttgtagatctgcccccagtcgagtcggctcgcgagatccggtaatcccagattcaactgccgcggtggacgatcgccggtgatcaacaaccgtgttttgccgctttccagaattcgattgtagagatcgaaaatcgccatctcccacaactcatcgcctgcaatacactcaatgttgtcgatacagaccaggctcaaatgctccataccgtcgagcacttccggaacaaaccaggtgcgtttatccagcgggacatagcccaccgcatcgccacgctggctcaattccgcgcaagccgcgtgcagcagatggctgcgccccgcgccttcgcgtgcccagagatagatgtaaccgctatgttcctgacgcagcacgttttgcagcgcggccagtaaagaggagttatcccccggccagaaacttgcaaaggtttcgtcgtcaggaagataaagtggcaaagagagctgtgccggtgtgttcagagatacctcaaccaggatttcacaaaatcggctgaagtttaccacagaatcccatgatgtttgaaccgggcagcaacactgcccggtcggtacattatttgtctgttatatccgcgtcttctgcgtccagcaccacttcttcagggcgcagcacactgatcagtttgaagatcaaacttaagccgataccgacgatggtcgccagcgccataccttttaactccgccgcgccgatgtttaccttcgcgccactgacgccgatgatcaaaatcacggaagtcaggatcaggttctgtgctttgttgtaatccactttgctttcgatcaaaacacgaataccggaagcaccgatgacaccataaagcagcaggctaacgccgcccatcaccggcaatgggatcatctggatagcggcagccagtttaccgacgcaggaaagcaggatagcgaaaatcgccgccccgccgataacccaggtactgtaaacacgggtgatcgccatcacgccaatgttttctccgtaagtagtatttggcgtagagccaaagaagccggaaatcacggtgctcaagccattagcaaacatgctacggtgcagacctggatcgcgcagcagatcttttttgacgatattagccgttactaccaggtgccctacgtgttcggcaataaccactaacgccgctggcagaatagtcagaatggcaaaccactcgaagcgcggcgtatagagggttggcagcgcaaaccagtgagcattaataatcggcgtggtatcgacaattcccattgcgaaagagagcgcgtaccccaccagcacgccaattaaaatcgggataattgccaggaaaccacgaaacagcacggaacctaaaaccgtgaccgccagggtggtaatagagatgatgatggttttggagtctggcgtttgcccttcagccgggagtaaacccgccataccggcagctacgcccgccagctccagaccgatgacggcaacgattgcgcccattgccgcaggtggaaacagcacgtccagccagccggtccccgctttcttcacgataaaagaaaccaggcagaacagcacgccgcacataataaagccgcccagcgcgacttcataccctaacggcaacagtaacaataccggactaataaaggcaaagctggaaccaagataagccggaattttccctttacagatgaagagatacagcagcgttccaataccgttaaataacagtacagtcgccgggttaatatgaaataagacgggcaccaggacggttgcaccaaacatggcgaacaaatgttgcaaactaagcgggattgtctgtaaaagtggcggtctttcactcaccccgatagcacggcgcgtcatagtattatcctctgtattatgtgttataggcgctttactcaaaaaaaagccgactcttaaagtcggctttaattatttttattctttatttcgtaccaaagattttgtcaccggcatcgccgaggcccggaataatgtatccgtgctcgttcagtccctgatcaatgcttgcggtatacagttcgacgtccgggtgcgctttttccagcgcagcgataccttctggcgcagctaccagcaccagaactttgatgctgctgcagcccgcttttttcagcaggtcgatggtcgcgataacggaaccaccggttgccagcattgggtcaacgatcagcgccatacgctcatcgatgttagaaaccagtttctggaagtacggtaccggctccagcgtttcttcattacggtacataccgacaacgctgatgcgcgcgctcggaacgttttccagcacaccgtccatcataccaagacccgcacgcagaattggcacaacggtaattttcttacctttgatctggtcgatttctaccgggccgttccagccttcgatagttactttttccgtttcgaggtcggcggtcgcttcgtaagtcagcaggctacccacttcggaagcgagttcgcgaaagcgcttggtgctgatatcttgctcacgcatcagtcccagcttgtgtttgacgagtgggtgtttgacttccacgatcttcatactctttctcctttgaggggcagccacaaaaaaaatcgacggattatacctcctttcttcaaggcggcaatattcttttcgttgactttagtcaaaatgataacggtttgagataaagttattttatattcagatggttatgaaagaagattattccatccgaaaactaacctttaccctggcacaagtcttctttcgccgcgcgcctggggaaaagacgtgcaaaaaggttgtgtaaagcagtctcgcaaacgtttgctttccctgttagaattgcgccgaattttatttttctaccgcaagtaacgcgtggggacccaagcagtgaccgataaaacctctcttagctacaaagatgccggtgttgatattgacgcgggtaatgctctggttggaagaatcaaaggcgtagtgaagaaaacgcgtcgtccggaagtgatgggcggtctgggcggcttcggtgcgctgtgtgcattgccgcaaaaatatcgtgaacccgtgctggtttctggcactgacggcgtaggtaccaagctgcgtctggcaatggacttaaaacgtcacgacaccattggtattgatctggtcgccatgtgcgttaatgacctggtggtgcaaggtgcagagccgctgtttttcctcgactattacgcaaccggaaaactggatgttgataccgctagtgcggtgatcagcggcattgcggaaggttgtctgcaaagtggctgtagtctggtgggtggcgaaacggcagaaatgccggggatgtatcacggtgaggattacgatgtcgcgggtttctgcgttggcgtggtagaaaaaagtgaaatcatcgacggctctaaagtcagcgacggcgatgtgctgattgcactcggttccagcggtccacacagcaacggctatagcctggtgcgcaaaattcttgaagtcagcggttgtgatccgcaaaccaccgaacttgatggtaagccattagccgatcatctgctggcaccgacccgcatttacgtgaagagtgtgctggagttgattgaaaaggtcgatgtgcatgccattgcgcacctgaccggcggcggcttctgggaaaacattccgcgcgtattgccagataatactcaggcagtgattgatgaatcttcctggcagtggccggaagtgttcaactggctgcaaacggcaggtaacgttgagcaccatgaaatgtatcgcaccttcaactgcggcgtcgggatgattattgccctgcctgctccggaagtggacaaagccctcgccctgctcaatgccaacggtgaaaacgcgtggaaaatcggtatcatcaaagcctctgattccgaacaacgcgtggttatcgaataatgaatattgtggtgcttatttccggcaacggaagtaatttacaggcaattattgacgcctgtaaaaccaacaaaattaaaggcaccgtacgggcagttttcagcaataaggccgacgcgttcggccttgaacgcgcccgccaggcgggtattgcaacgcatacgctcatcgccagcgcgtttgacagtcgtgaagcctatgaccgggagttgattcatgaaatcgacatgtacgcacccgatgtggtcgtgctggctggttttatgcgcattctcagcccggcgtttgtctcccactatgccgggcgtttgctgaacattcacccttctctgctgccgaaatatcccggattacacacccatcgtcaggcgctggaaaatggcgatgaagagcacggtacaagcgtgcatttcgtcaccgatgaactggacggtggcccggttattttacaggcgaaagtcccggtatttgctggtgatagcgaagatgacatcacagcccgcgtgcaaacccaggaacacgccatttatccactggtgattagctggtttgccgatggtcgtctgaaaatgcacgaaaacgccgcgtggctggatggtcaacgtctgccgccgcagggctacgctgccgacgagtaatacccccgtaattaaagcgccagctctgccgctggcgtttttcaattcacctgtaaatcgcaagctccagcagtttttttcccccttttctggcatagttggacatctgccaatattgctcgccataatatccaggcagtgtcccgtgaataaaacggagtaaaagtggtaatgggtcaggaaaagctatacatcgaaaaagagctcagttggttaagcttcaatgaacgcgtgcttcaggaagcggcggacaaatctaacccgctgattgaaaggatgcgtttcctggggatctattccaataaccttgatgagttctataaagtccgcttcgctgaactgaagcgacgcatcattattagcgaagaacaaggctccaactctcattcccgccatttactgggcaaaattcagtcccgggtgctgaaagccgatcaggaattcgacggcctctacaacgagctattgctggagatggcgcgcaaccagatcttcctgattaatgaacgccagctctccgtcaatcaacaaaactggctgcgtcattattttaagcagtatctgcgtcagcacattacgccgattttaatcaatcctgacactgacttagtgcagttcctgaaagatgattacacctatctggcggtggaaattatccgtggcgataccatccgttacgcgctgctggagatcccaagtgataaagtgccgcgctttgtgaatttaccgccagaagcgccgcgtcgacgcaagccgatgattcttctggataacattctgcgttactgccttgatgatattttcaaaggcttctttgattatgacgcgctgaatgcctatagtatgaagatgacccgcgatgccgaatacgatttagtgcatgagatggaagccagcctgatggagttgatgtcttccagtctcaagcagcgtttaactgctgagccggtgcgttttgtttatcagcgcgatatgcccaatgcgctggttgaagtgttacgcgaaaaactgactatttcccgctacgactccatcgtccccggcggtcgttatcataattttaaagactttattaatttccccaatgtcggcaaagccaatctggtgaacaaaccactgccgcgtttacgccatatttggtttgataaagcccagttccgcaatggttttgatgccattcgcgaacgcgatgtgttgctctattatccttatcacacctttgagcatgtgctggaactgctgcgtcaggctagcttcgacccgagcgtactggcgattaaaattaacatttaccgcgtggcgaaagatagtcgcatcatcgacagcatgatccacgccgcacataacggtaagaaagtcaccgtggtggttgagttacaggcgcgtttcgacgaagaagccaacattcactgggcgaagcgcctgaccgaagcaggcgtgcacgttatcttctctgcgccggggctgaaaattcacgccaaactgttcctgattagtcgtaaagaaaacggtgaagtggtgcgttatgcacacatcgggaccgggaactttaacgaaaaaaccgcgcgtctttatactgactatagcttgctgaccgccgatgcgcgcatcaccaacgaagtacggcgggtatttaactttattgaaaacccataccgtccggtgacatttgattatttaatggtaagcccgcaaaactcccgccgcctattgtatgaaatggtggaccgcgagatcgccaacgcgcagcaagggctgcccagtggtatcaccctgaagctaaataaccttgtcgataaaggcctggttgatcgtctgtatgcggcctccagctccggcgtaccggttaatctgctggttcgcggaatgtgtagcctgatccccaatctggaaggcattagcgacaacattcgtgccatcagtattgttgaccgttaccttgaacatgaccgggtttatatttttgaaaatggcggcgataaaaaggtctacctttcttccgccgactggatgacgcgcaatattgattatcgtattgaagtggcgacgccgctgctcgatccgcgcctgaagcagcgggtactggacatcatcgacatattgttcagcgatacggtcaaagcacgttatatcgataaagaactcagtaatcgctacgttccccgcggcaatcgccgcaaagtacgggcgcagttggcgatttatgactacatcaaaagtctcgaacaacctgaataaccctatgccaatacacgataaatcccctcgtccgcaggagtttgctgcggtcgatcttggtagtaacagttttcacatggtcatagcccgtgtggtagatggtgccatgcagattattggccgcctgaaacagcgggtgcatctggcggacggcctggggccagataatatgttgagtgaagaggcaatgacgcgcggtttaaactgtctgagcctgtttgccgaacggctacaagggttttctcctgccagcgtctgtatagttggtacccatacgctgcgtcaggcgctgaacgccactgactttctgaaacgcgcggaaaaggtcattccctacccgattgaaattatttccggtaatgaagaagcccgtctgatttttatgggcgtggaacatacccaaccggaaaaaggtcgcaaactggttattgatattggcggcggatctacggaactggtgattggtgaaaatttcgaacctattctcgttgaaagccgccggatgggttgtgtcagctttgcccagctttattttcctggcggggtcatcaataaagagaattttcagcgcgctcgcatggcggcagcacaaaaactggaaactttaacctggcaattccgtattcagggctggaacgttgcaatgggcgcttccggtaccataaaagccgcccatgaagtgttaatggaaatgggcgagaaagacgggataattaccccggaacgtctggaaaaactggtaaaagaagttttacgtcaccgtaatttcgcaagcctgagtttaccgggtctttccgaagagcggaaaacagtcttcgttccgggactggcgattttatgcggtgtgtttgatgctttagccatccgtgaactgcgcctttctgacggggcgttacgcgaaggcgtactgtatgaaatggaaggacgtttccgtcatcaggatgtgcgtagtcgcaccgccagcagcctcgccaaccagtatcacatcgacagcgaacaggcccgacgggtgctggataccactatgcaaatgtacgaacagtggcgggaacagcaaccgaagctggcgcatccgcaactggaggcgctactgcgatgggccgccatgctgcatgaggtcgggttgaatatcaaccacagcggtttgcatcgccactccgcttatattctgcaaaacagtgacttgccgggttttaatcaggaacagcagctgatgatggcgacactggtgcgctatcaccgtaaagcgattaagctcgacgatctaccgcgctttaccttgtttaagaagaaacagttcctgccactgatacagctattgcgccttggcgtattactcaacaatcaacgtcaggcaaccaccacaccgccaacattgacgctgattactgatgacagtcactggacactgcgtttcccgcatgactggtttagtcagaatgcgctggtactgcttgatctggaaaaggagcaagaatactgggaaggcgtggctggctggcggttgaaaattgaagaagaaagtacaccagaaatcgccgcttaatactttgcgggccgacgagaaatgtcggcccgcattattcaggcactttcgcgaatgggttcgatttcattcagcgtatcaattaacggctgcggcttaccaataagataaccctgcatataatcgatccccaaagagagcaccgcctcgcggatctcttcgttttcaacgtactctgccactaccagcattttcttcattcgcgccaggtggcaaatgcttgccactatctgataatccagactattactcacaatattgcggataaaactgccgtcaattttaagcagatcggcattcacatttttaagccgcgcatagctggcgtagccggtgccgaaatcatcaatcgcaatctggcagcctaattcctgaagatgctgcaaggtgatttgcgcctgcttaacattggtcagagcattactttcggtgacttcaaaaataagttgccacgcttcaatctgatatttagccagcaactgactgacttcaacaggaaaacgagcctgacatacgctggttggagacagattaatagcaaaacggtgagcgggcatcttcgctctgttttcagccataaattgcagcgtatgctcaatgacccacatgtcgatactgctgcttaaaccaaattcgtgcgcgaccggcaagaagctatcggggctgatcagttcatcattctcacctttcatgcgcagaagaatttcatggtaaacatcaccacgcataccggtaatcggctgggccatcaggaaaaaatggttgtgttccagcgcctgctgtagtcgattcatcatcgcgactttatctttcaattcgcgttgcaaatacattgccccgcgacgctgcatattttccggggcgttggtcacgatggaaagttcggcgaccgtatttagctctcccagcagcaggtagatatgattcactgggctgcgcacatagcagtaactgacgccaatctgcggttgcatcggcatgccatcccaaaagaaacgaaattgcttgagatggctatccagtgcggtaatgcgctcctggtggctttctgtattcagtcgcagcgcgagatcgttaccgctaagctgataaacatcttcacccggttccagcaagggactcagccagtgagaaagtttttgcttgtattgaatccgcagcatgatgccatagttcttaaccagcatttccatgccagggatgcgtaaataacaaagcgcagaccagggggcatcacgcaacgcgcgattcagggcgcgaacatttggcagatgaaccaccgggtccacatacgcaagccgctgaatgcgtctgactaccgctctctgacgggttgccagtacagccatataattgacaataaaagagaataccagataactggaggaggttatggtcagctgcgtggtatagccaggataaatgggaatgtaattttgatagctgtggatgctgatcatcaacacgaccgcccagagcaggctaatcagcttataaccatagcgcatcgctccccacatcatcaggggcagcaataaactcaaggtataattggtgctaaaaattgtgcttttttcatttaacggcatgcataacagcaacaataaagcacctaatgccagtagccagagcgcgaactcttttttggtgactttggcatcaacctgctgttttaattggctataatagctacgtaaataaaatggatttcgcactacccgaatgatgaagtagcacagcgggacaccgatcagattacccaccagtaaggcctgataattgattaaagtcccgaggttaaaaggcatgacaccgaccagattttctctgctcgccagtaatcctacaaatgcagcaaactggaaaagtatcagaaacagcgttgcaggaaacacaatctgccagaatatacgctgggaaattaaacgggtatcaccatgactaacgttgttacgccggggagtaaagaccctgtaaccgccccaacagagaatgataatgataataaaattagccgttaaacttagcgtttcgtaaaaacccagctctgcatatttgcggacaaaaatccctaaggcgatccctggcaatgccgcccagctgaaaaacatcatcatgctgatcatcagtgccagaggcagataaaagagaaaaacctcaccggaagaaatatgcgcgaaagtattaatgtgggcgaaaatgggcaagattaaagaaggcaggaacagcggaagcccccaccatttatcacgtatttttatataagttgcattcagtttcatagatgctcagcagaatcccccacatcctgaaggaggtgtattcagacaggcatcccacctgacttcgaatgatgattattcatcactatagagagcattgattctaagtgtcatatgaaagtaccaattgatatatatcaaacaaaataaccctgattaatgaattattacgtttatcatgttaattcatcattattacatcatcattgtaaataattaaattaacttccataacattaaaatatgtatccactgacgcttttttacataacgaagaattgaccattttgtcctgttgtgccttaatgtaagtaccgtccacagcgtgggacatacttcaaggaaccttttgtgagtcaggcaaccagtatgcgaaaacgacaccgatttaacagtcgcatgacccgtatcgtactgctcatcagctttatcttcttctttggccgttttatctacagctccgtcggtgcctggcagcaccatcagagcaaaaaagaagctcagcaatccacactctccgtcgaaagtccggtacaacgttaacggttaccttctccactttcacagaacataacggcacttcgctgtcggatgcttttgctgtttgggattatcaaagcggcagatattctttcatcttaaattttacgtctttatcctgactgatgtttatcctgtttggctgcgaaataaatataaaattaatatatatgttgtaatgatatatttttataaattattccctgcgtgaattttaataaatttaatctatccctttatacgcaatacatttactttcctcttttgatgatcttaaatgtcttatttttcgtaatgtgtataacaaggaatagtgatgaaatttaaaaaatgtcttctgcctgtggcaatgttagcgagtttcactctggcaggatgccagagtaatgctgacgatcatgctgccgatgtttatcaaaccgatcaactgaataccaaacaagaaactaaaaccgttaatattatttccattcttcccgcaaaagttgccgtagacaactcccaaaataaacggaacgcacaagccttcggcgcgcttattggcgcagtcgctggcggtgttatcggccacaacgtcgggtctggcagcaattccggaacgacggcaggtgcagttggcggcggagctgtaggcgcggcagcgggttctatggtgaatgataaaaccttagtggaaggtgtttctttaacctataaggaaggcaccaaagtgtatacctctacccaggtgggtaaagagtgccagtttacgacaggtttagccgttgttattaccacgacgtataacgaaacgcgtattcagccaaataccaaatgtcctgaaaagagctaataatcaggaggagtcatgaagaaagtttttctttgcgccatcttagcctccttaagctatccggctatcgccagtagtttgcaggatcaactctctgctgtcgcagaagcggaacagcaaggtaaaaatgaagagcaaaggcagcatgacgaatgggtcgcggagcgcaacagggaaatccagcaagagaagcaacgtcgcgcaaatgcccaggccgccgctaacaaaagagcggcaacggcagcggcaaataagaaagctcgtcaggataaactggacgccgaagcctctgcggacaaaaaacgcgatcaaagttatgaagatgagctacgcagcttagagattcagaaacaaaaactggcgctggcgaaagaagaagcccgcgttaagcgagaaaacgaatttatcgatcaggaactgaagcacaaagctgcgcaaaccgatgtggtgcaatctgaagctgacgccaacagaaatatgactgaaggcggtcgcgatctgatgaaaagcgtgggcaaagcagaagagaacaaaagcgacagctggtttaattaatcgatgttagtaacttcaatcctataattcttgaagataaaaaaccctctgtagtaacagagggttttgttcattcatagtgcagggtcaaatcattcccactcaatggtagctggcggcttgccgctgatgtcatacaccacgcgggaaataccgttcacttcattgataatgcggttggaaacgcgaccgaggaaatcgtacggcagatgcgcccagtgtgcggtcataaagtcgatggtttcgacagcacgcagagagacaacccagtcatacttacgaccatcgcccattacgccaacggaacgtaccggcaggaacacagtgaacgcctggctgactttgtcgtacaggtccgctttacgcagttcttcaatgaagatggcgtcagcacggcgcagcaggtcacagtactctttcttcacttcacccagaacacgaacgccaaggcctggtcccgggaacgggtgacggtacagcatgtcgtacggcaggcccagctccagaccaatcttacgcacttcgtctttgaacagctctttcagcggttcaaccaggcccatcttcatctctttcggcaggccgcccacgttgtggtgagatttgatgacgtgtgctttaccggttgcagacgccgcagattcgataacgtcagggtagatggtgccctgcgccagccacttcacgtcttccagtttcagcgcttcttcatcgaatacttcaacgaaaacgcgaccgatgattttacgttttgcttccggatcgttttcgccagccagcgcactcaggaagcgatcttctgccggtacgtgaacaatgttaagaccaaagtgatcgccaaacatatccagaacctgctctgcttcgttgaggcgcagcaggccgttgtcgacgaatacgcaagtcaggtttttaccgatagcgcggtgcagcagcattgcggttacggaggaatccacaccaccagagaggccgaggatgactttatcgtcgcctacctgctcgcggatgcgagctacagcatcgtcgataattttcgctggcgtccacagggcttcacactggcagatatcacgcacaaaacgctccagcatgcgcataccctggcgggtatgagtcacttccgggtggaactgtacgccatagaagcgtttttcttcgttagccataatggcaaacgggcagctttcggtgctggctacggtgatgaagtcggacggaatagcggtaactttatcgccgtggctcatccagacatcgagcagcggtttaccgtctgcggtcagcgcatcttcgataccgcgaaccagtgcgctgtcgtttacgacttcaacctgcgcgtagccaaattcacgttcgttagaggcttcaacgtgaccgcccaactgcattgccatggtctgcatgccatagcaaacgccgaataccggtacgcctgcttcaaagacatactgcggcgcacgcggactgttttcttcagtagtactttccgggccgccggaaagaataatgccgcttggattgaagtcacgaatttgtgcttctgtcacatcccacgcccacagttcgcagtaaacacccagctcacgcacgcggcgcgcaaccagttgagtgtactgagaaccgaagtccagaatgaggatgcgatgcttatgaatgttttccgtcattgacgcttattccgaggcaagtgaaacagataatataaatcgcccgacatgaagtcgggcgaagagaatcaggagcccagacggtagttcggggactctttagtaatggtcacgtcgtgaacgtggctttcctgaatgcccgcaccgctgatacgtacaaactccgctttagtacgcagttcgtcgatagtaccacagccggtcagacccatacaggagcgcaggccgcccatctgctggtgaatgatctctttcaggcgacctttataggctacgcgaccttcgataccttccggcaccagtttgtcggcagcgttatcgctctggaaataacggtcagaggaacctttggacatcgcgcccagggaacccataccacggtaagatttgtaagaacggccctggtagagttcgatttcacccggagattcttcagtacccgccagcatggaacctaccatcaccgcgcttgcgccagcggcgatagctttggcgatgtcgccggagaagcgaataccgccatcagcgataaccggaataccggtgccttccagggcttctactgcgtcagcaacagcggtaatctgcggaacaccgacgccagtcacgatacgagttgtacagatagagccagggccaatgccgactttaaccgcactgcaaccagcttctgccagagcgcgtgcacctgcagctgttgccacgttgccgccgataatttgcagatccggatatttagcacgggtttcacggatacgttgcagtacaccttcactgtgaccgtgggaggagtcgatcagcagaacgtcaacgcctgcggcaaccagcgcgtcaacacgctcttcgttacccgcacctgcgccaaccgctgcaccaacacgcagacggccttgctcgtctttacaggcgttcggtttacgttccgctttctggaagtctttcacggtgatcatgccgatcaggtggaattcgtcatcaaccaccagcgctttttcaacgcgtttttcgtgcatttttgccagcaccacttcacgggcttcaccttcacgcacggtgaccagacgctctttcggcgtcatgtaaacgctaaccggctggttcaggtcggtaacaaaacgcacgtcacgaccggtgataatacccaccagttcgttttcttcggtaacgaccggatagcccgcaaaaccgttacgctcggtcagttctttcacttcgcgcagcgtcgtggttggcagaacagtctgcggatcagtcaccacaccagattcgtgttttttcacacggcgaacttcttctgcctggcgttcaatggacatgtttttgtggataaagccgataccgccttcctgagccagagcaatagccaggcgcgcttccgttacggtatccattgctgcggaaagcatagggatattcagacgaatagttttcgtcagctgggtgctgaggtcagcagtattcggcagaacggtagagtgagcaggaacgaggagaacgtcgtcaaacgtcagagcttctttagcgatacgtagcatgggcaatatctcgaccagagtggttaataaatattgccgcggcattatacagagcgtaaccgattgcatctacccctttttgcaaaaaatgcttgctatccccgaagggcgggttactatcgactgaataacctgctgatttagaatttgatctcgctcacatgttaccttctcaatcccctgcaatttttaccgttagtcgcctgaatcaaacggttcgtctgctgcttgagcatgagatgggacaggtttggatcagcggcgaaatttctaatttcacgcaaccagcttccggtcactggtactttacactcaaagacgacaccgcccaggtacgctgcgcgatgttccgcaacagcaaccgccgggtgaccttccgcccatagcatgggcaacaagttttagttcgcgccaatattacgctctacgagccgcgcggcgactaccagataatcgttgagagtatgcagccggccggtgaagggctgctgcaacagaagtacgaacagctcaaagcgaagttgcaggctgaaggtttgttcgatcagcaatacaaaaaaccacttccctcccctgcgcattgcgttggtgtgatcaccagtaaaaccggtgctgcgctacatgatattttgcatgtgttaaaacgtcgcgatccttctctgccggtgatcatctaccctgccgccgttcagggcgatgacgcgccggggcaaattgttcgcgccattgaactggcgaatcagcgcaatgagtgcgacgtattgatcgtcgggcgcggcggcggtagcctggaagatttatggagttttaacgacgaacgcgtagcgcgggcgatttttaccagccgcattccggttgtcagcgccgtcgggcatgagacggatgtgaccattgccgattttgttgccgatctgcgtgcgccaacgccgtctgccgccgctgaagtagtgagccgtaatcagcaagagttactgcgccaggtgcaaagcacccgtcaacggctggagatggcgatggattattatctcgccaaccgcacacgtcgctttacgcaaattcatcaccgattacagcaacagcatccgcagctccggctggcacgccagcaaaccatgcttgagcgcctgcaaaagcgaatgagctttgcgctggaaaatcaacttaagcgtaccgggcaacagcagcagcggttaacacagcggctgaatcagcaaaatccacagccgaagattcatcgcgcgcaaacgcgcattcagcaactggaatatcgtttagcagaaaccctgcgcgcacagcttagcgccacgcgtgaacgtttcggtaatgcagtaacgcacctcgaagccgtaagcccactgagtacgctggcgcgtggatacagcgttactactgctactgacggcaatgtactgaaaaaagtgaagcaagttaaagcgggtgaaatgctaaccacacgtctggaagacggctggatagaaagtgaagtaaaaaacatccagccagtaaaaaaaagccgtaaaaaggtgcattaagccagcacgaattcaacgcgttttttgcttatcaagccatgcccgtgctgacagaagtaatctactgcaccacaggcttttaacacctgcaacggttgatggcagtctggacaaagagctttcatttcaataaattccccgcaggatcggcaacgcgcatggccgttatcctgatcaagcacatgctgacattgtggacaatgcagttccatatgaattcctccggtagccattccctctacattcatagagggaatggcagataaaatacttacggataattatttatttttcttgatgtgcttcatcagacgcttacgtttacgcatctgggttggcgtcagggtgttacgcttattcgcatacgggttttccccttctttgaactgaatacgaatcgggcttcccattacgtccaggcttttgcggaagtagttcatcaagtagcgcttgtaggaatcaggcaggtctttcacctgattaccgtgaatcaccacaatcggcgggttataaccaccggcgtgggcatatttcagcttcacacgacgaccgcgtaccagcggcggttggtgatcttcaacagccatcgtcatgatgcgcgtcagcatagaggtccccacacgacgggtggagctgtcatacgcttcacgtacactttcaaacaagttaccaacaccactgccgtgcaaggcagagataaagtgcacacgagcaaaatcgataaagcccagacggaagtccagcgtttctttcacctgctctttcacttcctgactcaggccatcccacttattcaccacaatgacaagactgcgcccactattgagaataaagcccagcaggctgagatcctgatcggaaataccttcgcgcgcatcaatcactaacatcaccacgttggcgtcttcaatggcctgcaacgttttgattacggagaatttctctacagcatcggtgattttgccgcgtttacgtacgccagcggtgtcaatgagcacatactcacgtccatcgcgttccattgggatgtagatgctgtcacgcgtcgtgccaggcatgtcgtaaacaacaacgcgctcttcaccaagaatacggttagtgagtgtagacttacctacgttcggacgacccacaatcgccagtttgatcggcagactttgcgggtcgaagtcgtcttcctcttcttcttcgccgttctcttccgcttcaaattgcgcccagtattcagcgtcttcgtcgacttcctcttgcggtgcgagatcttccatccacggcagcagcacatgctccagcagacttaatacgccacgaccgtgagacgcggcgatcgggtagatttcacctaaaccaaggctgtagaaatcaaccactgcctgatcgggatccagaccgtcagttttgtttgccaccaggaaggtcggtttttcacgggagcgcagatgtttggcaatcgcttcatctgccggcatcaggcccgcgcgcgcatccaccataaacagtacgacgtccgcttcttcaatcgccagcaggctttgttccgccatgcgggtttctacaccgtcttctgtgccatcaatcccgccggtatcaatacagataaactcacggccttcaatttccgcacgaccgtacttacggtcacgagtcagacccgggaaatccgcaaccagcgcatctcgggtgcgagttagacggttaaataacgtggattttcctacgttagggcgcccgacaagcgcgaccacaggtaccatgtttaaagcctcatttttataaatcatcagacaacgcacgctatattcgcgtcgttgttaaaaacaggaaaacggcccctgtccaggagccgttttcaaagtgaacgacagagacgattaacgtgtaatagagtacacggttccgtcttttgcctggatcagcagtttgccgtcagcggcaaccggttcagtctggaaaccggaactatcaactttttgctgggcaacgaaacgaccatcttcgacgttaatccagtgcagataaccttcactgtcaccgaccaccaggttgccattatacagcaccggagaagtcagcaggcgatgcagcagatcgctttgtgtccacagcgtaacgccgccatcaatggtcaacgccatcacccggtcattttgatcgaccagatagatgcgattgccgtcgacgatgaaatcattcacgctacccagttcgcgtttccacataatctgaccactgcgcagatcaagcgccgtcaggttaccattataggccagcgcgaaaacaacgccgttaacaacgacgggagtcgtgtcaacatcgctcagacggtcaatttcggtagaaccggtcgcctgggaaatacgctgctgccaaatcatctggccctgttccatcagcactgcgctgacgcgaccattatcgccccccacgacggccgcaccaaaagccgttgtcggcgcagactcgccacgcaaagagaggctaggcatatcgaggttaactgtccatttgacagcgccgtcagcttcgttcagcgcttgtaactgaccgttactggtgtggattaacaccagaccgtcgctgaccaccgggcggctaagtgcttcacccgcgactttagtttgccatgccacagtaccatcgctggtattcagcgcgtaaacctgcgccttttcgctgccaatgtagacatgcccaccagacacggtcacaccgccagaaagtaatgcaggctctttagagaaccagccatctttctcggccaggctgacagaccagatttctttgccatcatccgcattcagcgcttttactaaaccagcgcggtccgctgcatagacaacgttgtccgccagtgccggatgaagattggaatagaagttgccaatgccgctaccaacggaagtgctccacgccgtggtcggcgtaaactggttttcaacggttggcaatggggacatctttaccacatcttcttcgctgttaaacaggctacagccgcttaaaagggtaacggaaagcagtcctggcagcagtaatttacgcaattgcatcgggtccctctcagatggacaaattattaattttcatctgcatcatttcgctcagtgccggagtaacatcgcttttcacgcctgcttcccatgcactacgcgcaccttgcttatcacctttgctcagcaatgcttcaccacgcaggtcggcaacaatggcagcccacccttcacctttgatggtatcaagggttttcagcgcggcatcagcctgcttgagctgtacctgaacgcgagcaagacgcagatttatcacggctttgagattttcatcgctcgtgtctgccagcccctgttgtaactgggcggcagctttctctagttcatttttgtcaacaaattgctgcgcaagttccaaagaagccagcgcaccataagtatttttattttcagcagcaaatttttccgccgccgggatgctatccggtttgccttcgctcactgcggtaaccgcattttgataggcaagagaagcggagcgtgcagaatcaacctgatggctgttccagtagcgccagccaatcagtgcgccaacgcccaaaatcaccccaacagccagtgctttgccattttcagcaaaaaagcgtttaaccgcttctacctggtcgttttcgttctcgtaaatttccacgctgtccttctccttccttaacccagtaacgtgcgcaaatgcgcggctacgctatcctgcgcaactgccgtttgctcaccagagcgcaaatccttcactactgctgtgccgttagccacttcagactcacccagcaccacagcaacgcgggcaccccatttatcagcacgggcaaactgtttcttaaagttgccgccgccgtggttggtcatcaatttcacgcccggtaattcatcacgcagacgctcagctaatgccatagccgcagattgtgtatcagcaccactagccaccaggtatatatcgacaacaggatcggctttaaattccggattaacggcctgtactaacaatacaagacgttcgaggcccatagcaaaaccgacagccggtgttgcacgaccgcccagttgttccacaagaccgtcataacgaccgcctgcacacacggtgccctgggagccgagactgttagtcacccactcgaaaacggtacggttgtagtaatccagaccacgcaccagacgctggtttacggtgtaagcgatccccgcgctctccagcagtttgcacagaccggcaaaatgctcacgagattcctcgtccagatagtcacctaatgccggagcgtcgttgagaagcgcctgcacttccggatttttactatccagcacgcgcagcgggttagtgtacatgcggcgtttgcagtcttcgtccagcttttctttatgctgctcaaggaatgccaccagcgcatcgcggtaattggcgcgtgcttccaggctaccgatagagttcagctcaagagttacgtgctcggaaatacccagcgcgcgccaccagcgggcagtgagcataatcagttcagcgtcgatatccggaccttgcagaccgaaaacttcgcagcccaactgatggaactgacgataacgccctttctgcggacgctcgtgacggaacatcggcccgatataccacagacgctgttcctgattgtacagaagaccatgctcgatgccggcgcgtacacagcccgccgtcccttcagggcgcagagtcaggctgtcgccattgcgatcctcaaaggtgtacatctctttttcaaccacgtcggtgacttcaccaatcgcacgtttgaatagcggggtctgctctacaatcggcaagcggatttcactgtaaccgtagctgccgagcacgtttttcagtgtgccttcaatgcgctgccagatggccgtttcgccaggcaggtaatcgttcatgccgcgaatggcttgaatgttttttgccacgtttattctctttctgaatataaaaatgaaccctcaacgcttccctcaatgtttcgggagccatgcgggttcaatcatacacgggaagcgaggcgcttcccatcacgttattatttttcaacctgctgaacgtcaattcgacgcgcttcgtccagctgactggctttcgcacgaatgcgtgcttccagctggtcgatcatatcgttgttgtccagacggtctttgcgcacgccatcttcatagaggccgcttttcttgttgccgccggtgacgccgagtgtagaaaccagcgcctcacctgggccattcaccacgcagccgataatgctaacgtccatcggagtgatgatatcttccaggcgttgctccagcgcgttaaccgtaccgataacatcaaattcctgacggctacaggtcgggcaggcgatgaagttgatccctcggctacggatacgcaggcttttcaaaatatcgaaaccgactttgatctcttcgaccggatcggccgccaggcttacgcgcagcgtgtcgccgatgccttcagacagcagcagacctaaaccaatggcggattttactgccccgctgcgcgcaccaccggcttcggtgatccccagatgcaacggctgatcgatctgttttgccagcaaacgataagactcaacagcgaggaagacgtcagacgctttcacgctgactttgaactgatcgaagttcaggcgatcgagatgatcaacatgacgcatggcagattccagcaacgcctgcggcgtcggttcgccatacttttcttgcagatctttttccaggcttccggcgttaacgccaatacggatcggaatgtttttatcgcgcgcacagtcaaccaccatgcgaatacgctcttcattaccgatattgccagggttaatacgcagacaatcgacgccgtattccgctactttcagcgcaatgcgatagtcgaagtggatgtcagccaccagcggcacgttaacctgctgtttgatgagtttgaacgcttctgccgcgtccatcgtcggtacggatacacggacgatatcagcgccaacgcgttccagcgccttgatttgattgaccgttgcttcgacgtctgtcgtacgcgtattggtcatggactgtacggcgatgggagcaccatcgccaatcggcacattcccaacgtaaatacgtgtactttttctacgttgaattggagcctggttatgcatgaaaaatctcccgcgttacccgtctgttactgcgccggactttgttcggcattgagggtcagacgcgcaacctggttagttctgataaaacgactcagatcgacaggtttcccttgatactggatctgtactgcggctggcgcaccaattttcagtttgtacggtgcctggccggttaagttcaaattaccgtctttacgctgcataccgctaaacaattttttaccggtagcatcagtgacctccagccagcaatcggcagtaaagttcatcaccagcgcattcggatcagccaccggcgtggtcacgccagcctgatcggttggcaacggcgcagcaccatctggcgttgttgctgccgttggtgccggggtcgcggcggtatcaacatttgcctggctagggctaacaaccgcattctgttgcggatcaacagctggtgctggcgcagttacggcaggtgtttgcgtgttggttgcggtagtatccacagacgctggcggcgtggacgttgtagccgggtctgtagttgtgctcgtatttaatggaacactctgcccctgctcgctattactgctcagttccgcgctagattgatcggccatagtggtgatctcttcctgctgagctttgcggtcttgccaccaccaggcaccgctcaggccgataaccacaaacaacaccagccaagtgaaggtcatcagccagccgtcgcgttttttgcggcgtttaccgagggaaaaactctgcatcggcgcaacttttgcagcccgaagtggagcctgcttttccagccctggcagcagttcttcttctggaatatgtaccagacgcgcataagagcggatatatccgcgcaggaatgtactagcaagatcggcgggtgccttatcttcttcaatgtcgcgtaccgtggaaaccttcaggcaaagtcgctcggcaacggcctgctgactaagtcctagttgttcgcgagcattacgcaggcgagcgccggtagtaagtgcttcattttggtcgtgcgtggcttcagtattcattcgctgcaggtacgtttaaatgagaattgagatgccggtgaaccatcatgctcacccacaccgcgaaacatccgttaagttaaccgttatcatacagtataagaccgtctgtgtgctcgtgacaaagcccacattcactaaggctaacttactgttgcatcgttacatactgccttaaagtcagcaaaaacgcaccgttaatattgaccagacaattgcaacttaatacttcattcataaaacattacgccacggtacataaagtaaccgtggcgtaatggctatcagaccgctttaatgtcgatggcttcaccctgcatccgtttacgcagggtacgtttcgtacggtcgataacatcgcccgccaactgaccacaggcagcatcgatatcatcaccacgagttttacgcacaatagtggtgaaaccgtagctcatcagcactttactgaaacggtcgatacggctgttgctgctgcgtccatacggcgcacccgggaacgggttccacgggatcaggttgatcttacacggcgtatctttcagcagttccgccagttggtgcgcgtgttcagtgccgtcgttaacgtggtcaagcatcacgtattcaatagtgactcggccctgattggcgttggatttctccagataacggcgcaccgcagcaaggaacgtttcgatattgtactttttgttgatcggcacaatttcgtcacgaatttcgtcgttcggcgcgtgcagggaaattgccagtgcaacgtcgatcatatcgcccagtttatccagcgccggaactacaccggaagtggaaagcgtgacgcgacgtttagacaggccaaaaccgaaatcatcaagcatgatttccatcgccggaacgacgttgttcaggttgagcagcggctcgcccatgcccatcatcactacgttagtgatcggacgctgaccggtgacttttgctgcgccgacgattttcgccgcacgccacacctggccgataatttcgctcacccgcaggttgcggttaaagccctgctgggcggtggaacagaatttacactccagcgcacaccccacctggctagagacgcagagcgtggcacggtcgtcttccgggatatacaccgtttcgacgcgctgatcgccaacggcgatcgcccatttaatggtgccgtcagaactacgctgttcttcaaccacttccggtgcgcggatttccgccacctctttcagtttgccgcgcaacactttgttgatgtcggtcatctcatcaaagttgtcgcagcaatagtgatacatccacttcatcacctgatcggcgcggaagggtttttcacctaaatctttaaaaaactcccgcatctgctgacggttgagatccagcaggttgatttttccatctttcgtggtgacgttttcaggtgtgactaattgttcagacatatgctattccggcctcgttattacacgttatggcccctggagggttgaaaaaagaaacgccccggtgagcggctgctcgtccgggggcgctgcattgtacaaattctggcgcacggatgccacgtttgcacgcggcatttacgaaattattaacgggtgcgcgggcacacttcgccttcgccaaagaaataagcgatttcgcgagcggcagattcgacggaatcagaaccgtgggtaccgttttcggtcaggctgtcagcgtaatcagcgcgcagagtaccagccagtgcgtttgccggattggtcgcgcccagcagatcgcggtgacgctgaacggcgttttcaccttccagcacggaaaccacgatcgggccagaggtcatgaattcaaccagaccatcaaagaacggttttccatcgtgttcagcataaaagccacgtgcctgttcaacggtcaggtgcagcattttggtgccaacaattttgaaccctgcagcttcaaagcgcgcaaagatattaccaatgacgttttttgctaccgcgttcggtttgatgatggaaaaagtacgttcaatagccatttttacctctgtaaattgttctgttgttgtctgtaccagcgtacgagatggcgcggattataatgagcaacagggccgttgactattgatgaaggtaacatttttttaaaataaaatgagttttagcaacaatcagggacaaaacagattattgcatgacaaatttcactgtcgcgatttgccccacgtcatccatcaccagcaattgataatcacctttatccgtcaaatgcagggtcacgttgcgcccgcgttcagttaacggttcgccattcagaaaccaccagcgttcacctgcccctccactactttgcaacggcaaagtcgcttccgctgcgcccggtaaacgtttaataatcgcgccatcgcgaacgcctgtcagctgcagcgggagctgggcatcgtgaccgtatggcgggcaacttgtgctggccggtggtaagcgcacagcgcgacgttcacttgcgggcagccagggttccagcggtagcggccagacatttatcatttcttgtcgcgcttgcgggcaatcagcggcaacacgtttgccattttcatccagccagatggggaaacgaatgccattaatgccttcctgctccggcagtaatagagttggcggctgactcccgtccagcagccaggttgccaggcggcggcgacagttaccgtcaccttccggcaaagactgtccgcccggccagcagataacgccacgagtgacactgttcgggcgcgggtcttccggcagattcgcactgcggctcagtaagatattattgacctgattcaacaatggtacggcactggcaaagccaaactgaccaacaacgggcgtgccgtccggtctgccagtccagatcccaatgacatagcgagcgttaaccccaatcgcccaggcgtcacgatagccatagctggtgcccgttttccatgccagtggggcgacgcgcggcaaggcactatccggcaagggttgcgcttcatcagccataatccggcgaatgatccacgccgccccgctgctcattaaaggccgttcaagcagcggatcgtcaggctgtaagcgcaatttgcctgccttgccgtggcgagcaaacgcggtatacgctgccgccatatcttccagttttgcaccagcgccgccgagaatgagactaagattcggcgcagcaccgttgggcaaatataacggcaatccaacattgcgtaactttgccgcaaaccgtttcggtccataggcttccagcacctgcacagcaggtaagttcaggctgcgcaccagcgcctcgctcatgctgatcgggccatgaaaaccgctatcaaagttacctggtcgataatcaccggtgcgccgggggacgtcttgcagcagacttgccgggtggatcaagccttcatccagcgccagaccataaacaaacggtttgagcacacttcctgggcttcggatgctattgaccatatcaacatgaccaaagcgactatcatcgttgagatcaacgcttcccacccagccgcgaacacgcatatcggtatgatcaaccacgatcatcgccagactgctgcgcggtggcaaccgccctttccagttttgcgccagttcttccagacgtcgttgaagaccggcatccaacgtagtagtgattttgtcgcttttgcttttaccgagcatcatgcggctaaacagcggtgccagttgcggcatttgtcggggggccagccagatgggttcttccctactctcttttacctgctcacgggaccacacaccttgcacggccatccgttcgagcactttattacgcgcggcttcggcacgctccggccaacgatccgggcgaagacggctgggcgcttgcggcaaaaccgccagcattgccgcctcggaatagcttaaattcgcagggctttttccgagataagcccaacttgccgcaccgatcccctgcaacgtaccgccaaacggagcgcggttaagatacaaggtcagaatttcacgcttagacagatgccattccagttgcaacgcgcgccagagctggcgaattttgccgccaaatgttttggggtgaggatcaagcagacgagcaacctgcatagtgagcgtgctgccaccggaaataacccgtccgctagtgagatcttgccatgctgcgcgcgccacgctgaatggattcacccccggatgcttccagaaccagcgatcttcataattgatcagcgcttcaaggtaacgtggagaaacatcttcgattgttaccggataacgccagatgccgtcagcatcggcgaagcgccagagcggcgtaccatcctgcgccacgaccactcgtgcgggattgacttcatgcagcggtagaggccagagtttatctgctccccacgctgcaagaaaaaggagaaagggcgcggctgccaacgttatccagcagccgcgtttggttaacaagcgaggcatttacggtctgacaatcagcagatcttcagccgcgccggtcgcccgccattggggaacatacatactttccaccatcggttgcggtacctgatacgttcccggcgtcaccgcccgcgccagatacaccagcgttaccggttggtattcatcaacggcaaccgccgccacaaagcgatcgtcacggaactcaatgtgcttaatgctcgcctgctgcatctggttcagtaagttctgcacttcgccaccactttgctccaggctggcgctaccgttcgccagattctggttttccagttccagacccgcaggcagcagatccacgactaacgcatccggcacgctgttactggcttttacctgcaaccacaccagcaccagatcgccgctacgtaagctgtccaggcttttgctcttaccatcagtaccaagaatatgacgctcgatttgcagcacattgttcgccggtaaaggtgcggattgcggataaccgctggcatccatacgcaaccataacggctgatcgccactgttgctcacctgcaaggtgacaagttgatcgctattcagattgctgttttgcgctttctcgcctgtcagctgctcagcactgaaagaggtttgcgcctgccatttaccgggtaaatcctgaatcgtacgggcagccaggaacaacgcgttactttcctgcgtgcttagccagcgttcaccaaacgcctgctggctaagtgtgttcagcaaagtgtactgctcatcgggtagcagtttattttcttccagcaaggagagcattaacgcgttgtcgcgcagactactaccgtaatcacccagccatatccgctcatcactattacgcggcgttttcagcgccagcgcaatcgcttcttcaccacgcgtcgcatcacccatggttttcagcgcaacgccaagttgcagcagcggtaaaccagaagcggcatctgcacgatgctcccagatttcacgcagcgcacccagcggagccttttgctgacgggccaacaccagcgcagcgtaagactgtacggcgaatttactggctttgagattatccgcgtacgggatgctcatcatgcccggatcttgtaaatagcgcagcagacgctcattaccccggttaatggcgtctgtcggcacgctgtaaccctgttcgcctgcgcggaccaggaaatccatcacgtaagccgtcagccagtactcttcgtcaccgtttttatcccacagcgcaaagccgccgttatcacgttgcatttgcagcaaacgggaaatgccgatatcgacgcttgcacggcgtttctcatcactgtcgcctttgatgcccaacgcctgcagttgggctgcgttggtataaagactcggaaacaggccgctggcggtttgctcaagacagccgtacggatacgcttttaactctttgatataacgtgcgatgttcagcggtggtttgccgctcaacaacaattgcccttccagcgtaacagggctgaagttttgcaatccatccgccggaatcgcccatgtctcaccaggctgtaacgccgtaccgtaattaaccgtttgtgccgggaacgccggacggacgccgattttccactgcttatgctgatcggcaacggtttcacccggtaacgctaacccgctaatggtggcctgaatttctccatcgccataacccggcaatgctcgcaccgggataaacagcgtagtacgcacacctggcgctaattcaacggctgcgggactatcgctgaccagttcaagcaaaccactggcggtcagggcaacgttcagtttttgcggtttatcggtaagattagtgatatccagcgtcagacggctggtatcgccactcgccataaagcgcggcatgttcagttcagcaatcaccggtgcggcaactatcactttactttcgttgctaccgaagtcatctgccgtccaggcttgcgccatgacgcgcaattcaccgttaaaatcgccaatcggcagtgtaacgctgccttcgccctgttcgttgagcgttaccggcagcgcctgctgcacgacaatattgacgtgattgaccggcggtttaccaccacgtttcagctcatcaccatcgccaccgaaacgcagagctgccagacgcccctgaccttcaataacctgaccgtaaatatcgtaaatgtctgcgccatagcgtttctgaccaaagaacgcctgccacggatctggcgtgacgtagtcagtaatattcagcacaccactatcaacggcagacaccagcacattcacctgtttaggcttctcgccatttttagtgctggctttaattttcacggttaatggttgattgggacgcatttttgctggtgtttccagcgccagatcgaggcgacggttttcatcgccaagcggcagatgcaacacaccaaccgcgcgttttggcgtcgcggagcgagatttatcgccaggacgtaccaccagcgtacttaaatacagatcatgacgattccaggttttatcgaccggaatcgtcagatccagcccttgagcccgaacatcaatctcttgccaccacagcggcccttcactggactcgaccatcgcataacctttacccgccgttggcgcggcgatatgcaacttaatggtgtcgccagggcgataactggctttatccagtttcagcgtgacacggtcgggtcgcactgcgccgctaccgtcgctgttgtcctgccagctatagccagcccagaaacgaacactactgaccgcttcattcggcgctttgacttccagacgataagcgccccactctaccggaaaactgaccttgccggtttcgtccgctttcagatccagagtttgttcattttcgatcagatctttttgatcaaactgactctgccagccttcatcttcactccagttccagtagtaatcgcggcgttcgcgaatcaggcgcacctgcaagccgctcacggcttttttcacgccttgcgcatcgctataaacgatgtcaaaagcggcgttactgccttcatcaacaatgggctgtttcaccgtgctgtcagtacgataatcgtaaacgcttttgctggcgaactgcggacggatccccggcaatgcatcggcaggccagatagcctgctcagcgcggcgcgtcaccgggcgaccgccgctttccagcaaactaccctggaaaataacctgtaatggggaatgcgtttccttccactggctttctgtagaaacttcgccgcgccctttatcatccagcgtcaactgaacttcatccagcgtgcgggaaagattttcggcagctatatcgccgaattcaaaaccaggtaaggcactcacagcttcacgcagtgggcgcaggaaaagttgcccttgcaaagtattaccattagcaggtgcaccatacaggtagtaccccaccacggagaatttcacttcatctttcggcgttagcggggttttctcaccggtcagattcagcgccatgcgctctggcataaaatcttcgacgtggaaatcccacatccgatactgattatcgcccgtgttagcgcgaatatgccacataccggttgccgcattgctatcgagtggccaggtaaagtggtagaggccattctccggctgactaacgacgctcctgagtacctgcccatcgggtttaatcacgtctaacttgatgggttgattgggcaacgctttaccgtctgcatcacgcagcaaaccattgaggattaccgtttcacctgggcgataaagatcgcgtgggccaaacatgaaaaactgtttgctatagcctggcgcgccagcaatgttaaattctgctaagtccagcgccggaagttttaaatcgagtagcgttgtctgaccgtctttacgcgccaacagtaatgccgcgtttttatcattttccagctgcacatgcccctgagcgtcactggttgcctgagtcagagtctgccctttctcatttaataaagagacttcaattccttgctgggccgcgccgttttccagactttgggtaaagatatccagacgattgtgataacggtgagcactaacgccgatatcacttaacgtaaacagcgtcgcgggattactgtaatcgtaacgtccagcctgattcatcacagccagatacacgcccgcctgctgaagcggtttgatatcgcccagcggcagcaataatttttcacgggtgttacgcgcaggattgagatcaaaccgtccggtgtagaccagatccgccatctgcagcagtttgtcactctgccagttcgccaggctattgcggtattcccattggctaatgaatgctggcagagattctggcttaacgcggaagaagttaacatcgacattattaacgttgagcgccattaccggcagcccttcaacgactttgccaggcagcaggctaccacggctggcaaaaccgacgctgggttggatgtcgcgggtagttatagttttttcgtaatctttactgaaggttgcgttgttgagtgctttgacctccttgccaatagtaacgatcaaatcacgtttcggttcgaggtggcgtaaacgtaactctttaagattatcactcagctcccaggcaccatccactttgccgcttttttttatcgacgacatgaataacgcgactgaaatcctgatccgggtcgagagggatggagaacgtcagcaccagcgtggctgcaccatcaagttggacttcagagagatccagcaatgtcagcaccttaccggcactctgttgggccagtttttgtctctccggcacggagagttttgcactactcgcgttttcactagaggccgctttagtaacttcagaaggcgcatcttttttcaccgctgttggcgcgttatcgttgttgtcgcaccctgccagcgccagcattagcatgcaggcggctacgcgtaactttttcatttttcatccctgccacaatggcccgttagcaacgtcgaataattattatgcgtgagaatttacgttatgtaattcagtatcacgcccatacaatccgaattttagtgagaattgtggctcagacagccaaatcagcctcttttgcttgtcgcttttcactaaacatccgacaatttagcctaaccccggcaaaaatggagatgcctatgtccacgacatggtttgtaggagccgactggctcgccgaacatattgatgacccggaaattcagattatcgatgcccgcatggcgagccctggacaggaggatcgtaacgttgctcaggagtatctgaatggacatattcccggcgcagtgttttttgatatcgaagcgctttctgatcacacttccccgcttccgcacatgctgccgcgcccggaaacgttcgccgtggcgatgcgtgaattaggcgttaaccaggataagcacctgattgtctatgacgaaggtaatcttttcagtgccccacgagcatggtggatgctgcgcacctttggtgtagagaaagtgagcattctggggggtggacttgcaggctggcagcgcgatgatctgctgttagaagaaggtgcagtagagctgccggaaggagagtttaacgccgcgtttaatcctgaagccgtggtgaaagtaaccgatgtattattggcaagccatgaaaatacggcgcaaattattgatgcccgcccggctgcacgttttaacgcagaagttgatgaacctcgcccaggtttacgtcgcggacatattcccggagcactgaatgttccgtggacggaactggtgcgcgaaggcgaactaaaaacgaccgatgaactggatgcgatattttttggtcgcggcgtcagctacgacaaaccaattatcgtcagctgcggctctggtgtaacggcagccgtggttttgttagcactcgcgacgctggatgtgccaaacgtgaaactgtacgacggcgcatggagtgaatggggcgcgcgggcagatttaccggttgagccagtgaaataagtattttacaggcaataaaaaaccgccgaatttggcggttttttattgctagtctggttcgcggcctttccagcaggttgacttgtgttacatgagcaacgcaggtgcttcacagcaaaacaatactcaccagtaactctctttttgtcaagcaaaagagagtaattattgtttatttagcgtattatcgacaccggccctttccgccgtgttcggtaataaaataacctggcttattagtccgaattcagacaaatataaataaatcctgctcaaaattaaaaattctaaccggtaaaagatattacttaaacatgtaaattcactttcctttaaaaaacaaaaaaccgccaaaatcaggcggttttttgttgctggtccggttcgcggcctttccagcaggttgtattaccgtagtaatgcaagcgcgtctcagcggagacaatactcgccagtaactctctttttgtcaagcaaaagagagttattattgttctgttagtgtattatccactgcggccctttccgccgtctcgcaaacgggcgctggctttaggaaaggatgttccgtggccgtaaatgcaggtgtttcacagcgcttgctatcgcggcaatatcgccagtggtgctgtcgtgatgcggtcttcgcatggaccgcacaatgaagatacggtgcttttgtatcgtacttattgtttctggtgcgctgttaaccgaggtaaataataaccggagtctctccggcgacaatttactggtggttaacaaccttcagagcagcaagtaagcccgaatgccgccctttgggcggcatattttagattatccgattctgtttaaagtcacgcaaaaaaccaccccagcgacgttcatagaatggcgcaatatgttcggtaataaagtggctaattcctttttccccttttttcacctgacaaatatcgattggttcatcgccaggtaatgtatcggtcgctacacttcccgtcgcctgaataatttcttcgatatcaccatcggcttcaatgccaataagtaaattaggctgtgcctcttcgttctctttaatactacaaataaaagcacgcttcaccggcttaatggttttaaataaggtggtgagactatcaatcatttgtgctggcggctctgcgacttcgcttaatatcaggctttcaccgccttccaggatttcctggctgctcagcggatttccctcttcaccaatcaacaaactgatttcacgcggcataaattctttaccggttggcagtttggcattaaggaagagcgtttcgccaagtgtcatctcaaacagcgtgcgaacgggcattacgacaaatgcctgttcgtcttcaaccgcctgttgaagtgcttctaagctggtgaaaaaaggaatgacgctggtgccgtcttctttttcccagtgctgtaaatcaagcgcgctatcttcaaccacagcctcgccctgcgccgccgtaccaggcacccagacggtggattccagtagagtacggaaaaaggccgggcggtgcgccggttcagttgctgctttttccagcaggtcttcaagttcgttttttgtttcggacataagaaccacaattcattcaacgttcggggcgcaaatgcctgatgcgctacgcttatcaggcctacaagggattcgcaatttgttgaatttgcagaatttgtaggccggataaggcgtttacgccgcatccggcatattagtttacgccgttaacagattagctatcgtgcgcacaccaagtcccgtagcgcccgcagaccactgttcaaccggcgctttacggtaagtcgcgctgcagtcgatatgcagccagccttgctgatagttctcaacaaagtggctcaggaagcccgccgccgtgctcgcgcctgccggatacgccgcgcttccggtattgttcagttcggcaaagttagacggcagctggctgcggtggaactccgccagcggcagacgccagaacggttcgttctcctgcgcggcactcgccagcaagcgaccggccagcgcatcgtcaaaactgaacagcgcgtgataatcattacccagcgcagttttcgccgccccggtgagggtcgccgcatcaatgatcatttccggtttctgcgcactggcatcaatcagaccatcggcaagcaccagacgcccttcggcatcagtgttcatcacttcaacttttttaccgttgcgataggtgatgatatcgcccagcttgaacgcattgccgctaatcaggttatccgcacagcagaggaacagcttcacgcgcttgttcagtccgcgcgtaatggcaaatgccagcgccccggtaaccgttgccgcgccgcccatgtcgctcttcatgctgtccataaacgcagtctgtttgatgctgtagccgccggagtcaaaagtgatacctttacctaccaggcacgcgtacactggcgcttctttatcgccagttgggttgtaatccagcgccagcaataccggagaacgttcactaccgcgtccgactgtgtgcagccccatataaccttgctcacgcagatcttcgcctttggtgatccgataagtcacacgatcgcccgcgacgttgctgatcagatcaacagcacgctgtgccagttggcttggtcccaattcttctgccggtgcgttgatggtgtcacgcacccagtcgatgatcatcaggcggttatccagttcctggcgctgggcatcgtccagatccggccacaccactttacgcgtgcctttcggggctttgtaaccttgccagaatgcccagcagcgatccgcatcccagccttcaccgcttaactgaacatgcttgatgcccagaccgtcaatcttgcgcgccgcacgctggatcagccccagatcgtctgccccgttcaaatgcagggtaatgccgtcattattaatgctgtaagttgctttttctccccagcgcgcgtcggcaggttgggtagagagggtaatcttcatcgcttctgtcattttagttatccttctttgtaaaagggccgccagttggcagccccaggatttttccgctaaatgattcgcgttgcaggaaggcggcaagtgagtgaagccccaggagcatagataactatgtgactggggtgaacgagcgcagccaacgcatctgcggcgtgaagcatgacgcggaaattattcggcctcgtccagccagactaacaaaatcgcttcgaggattttctcgttggatgcctgcgggtcgtcgtcgaaatcttccagatcgcaaatccactgatgcatatcggtgaatcgaaccgttttcggatcaagatcgggatacgcatcgtacagtgcttcgccaatttcgcggctatcggtccacttaagtcccatactaacctctgttaatgctcacgcgcatggttgatagtgtaacgcgggatttcgactactaaatcttcgtcggtaacgcgcgcctggcagcttaaacggctttccggctccagtccccaggctttgtccagcatgtcgtcttcctgctcactgctttccggcagactgtcaaaaccttcacgaacgatgcagtggcaggtggtgcaagcacaggatttttcacaggcgtgttcaatctcgataccgttacgcagagctgcgtcgagaatggtttcaccgctattagcttccagaacagcgccatcagggcagagatcctgatgaggcaaaataacaatctttggcatattaaacctcgtccacggaatggcctttcagcgcacgacgaacgctctggtccatgcggcgagcggcgaaatcctgggtttgtttgtctacgtttttaatcgcttgttcgatggcgtcaacatcatcgccctgcgccacttcactcaggtgagcggcagcatcgtcaatgacctgacgttctgcggcgcttaacagcgcggcatcagcagccagcgcgccgtgcagactttccagcacacgcgccgcttctactttttgttctgccagcattcgggcttttacgtcctgctcggcatagctcatactgtctttgatcatgctagcgatttcgctatcggtcagaccgtaagacggtttgacctgaatagacgcctcaacgccggtggatttctccatcgccgtcacgctcaaaagaccgtcggcatcgacctggaacgtcacgcgaatatgcgcaccgccagccggtagcgccggaataccacgcagcgcaaaacgcgccagactgcggcagtcctgcaccagttcgcgctcaccctgcattacatggatagacatcgccgtctgaccatctttaaaggtggtgaaatcctgagcgcgggccaccggaatagtggtattacgcggaatcactttctccaccaggccgcccatcgtttcgaggcccaggctcagtgggatcacatcaagcaacagcatttcgctgtctggcttgttacccaccagaatatccgcctgaatcgccgcgccaatagcgacgactttatccgggtcgatggaagtcagcggtggacgaccgaaaaattcgcctacccgttcacgcaccagcggcacgcgagtagaaccgcccaccatcaccacttccagcacttcatcagcttctacacccgcgtctttcagcgcgcgacgacaagccagtaaggttcgttttaccagtggcgcgatcagttcattgaattgttcacggctgatttcgccctgccagcccgcaacgttaacggtcacggagtccgcatcgctcagcgcgattttggctgcaatggcggcatccagcagttcacgctgaacgcggttatcgctacgatcaggaatgcccgcctgctcgcgaatgtaatccgccagcagatggtcgaaatcatcgccgccgagcgcggaatcaccgccggttgccagcacttcaaacacgccgcgacttaagcgcagaatggaaatatcaaacgtcccgccaccgaggtcataaacggcgatcacgccttcctgaccggaatccagcccgtaggcgatagccgcagcggtcggttcgttaagtaagcgcaggacgtgaaggcccgccagacgcgccgcgtctttggtgccctgacgctgggcatcgtcaaagtacgccggaacggtgataactacaccatccagctcgcctgccagggcttcagttgcccgcgccgccagtgctttgaggatgtccgcagaaacgcgcaccgggttcagcagccccgccgccgtttcaatcatcggcaggccgttttcgctggcctggaattgataaggcagatgcggatagcgttgctggatatcagccaggctgcgtcccatcaggcgtttaacagaactaattgtgttggcggtatcgagcgctgcattagtacgcgcgtcataacccacgctatgcccttgctgttgatagtgaacaacagatggcagcaggtgacggccttcatgatcggctaacgtttcggcctgaccgctgcgcactgtcgccaccaggctgttggttgtgcccaggtcaataccggccgccagacgacgctgatgcggcgcagcactcaaaccaggttcactaatttgtaataaggccatgtttagcttccagaaattaaaaatcgagcagtttttcttcgagttgttcggcactgcttcgcagtttatcgagaaaacgcagcttacgcacggtatccgccgccgcgtcccacgtctcgttgtctaactgttcaaccatcaactgatggcgggtatcaaacatctttttcacacgtttgataaagctttccagccgcgcttcatctttcgcctgttcgatctcgtccagctcttcgcgcagctccaactgttccatcaggaacgcggtgtcgcgcacagtatgctgctcgctggcgagatcaaagccgtgcaaagaaagcaaatattccgcgcgcattaacggatgacgcagcgtttgccaggcctggttaatggttgcagattgctgtacggcggcgagttgttccgcctggcttccgctggcgaatttatcaggatgatactgacgttgtagatcctgaaaacgcaggctcagcgcctgggtatcgagttgatagcgggcaggcaagccaaagagggtgaagtaatccataacattctcagggctgcgatccgccgcgataacggcgaatcaggtaaaacaaaccccacgcgcaggcgaccacggtggggttatcggtatgcgcatcaaacgtggaagctttcgccgcaaccacactcatctttgacgttcgggttggtgaatttaaacccttcgttcaggccttcttttacgaagtccagctgcgtaccgtccagaaattgcaggctcttgccatcgaccacgactttcacgcctttgtcttcaaacacgatgtcttccggcgtcggttcgtcaacaaattccagtacataagccataccactacacccggaggttctcacgcccagacgcaggccaaaccctttaccgcggttagccagaaaggtatttactcgcgctgctgcactgtcgctcagtgtaatgctcataaccaaacctcaactcttattttgcttcacgtttgcttttatagtccgcaatggcggctttgatcgcgtcttctgccagaatagaacagtgaattttcaccggcggcagttcaagttcttcagcaatatcggtgtttttgatcgcctgcgcttcgtcgagagacttccctttcacccattcggtgaccagggagctggaagcgatagcggaaccgcagccgtaagttttaaaacgcgcgtcttcaatgataccttcatcgttgactttaatctgcaacttcatcacgtcgccacaggccggtgcccccaccatgccgctgccgacgttctcgtcgttgttgtcaaaggaacccacgttacgcggattctcgtaatggtcgataactttttcgctgtaagccattataaattctcctgattccgataccgattaatgatgagcccattcgatgctgttcagatccacgccctgcttgtacatttcccacagcggagaaaggtcacgcagacgaccgatggatttacgaactaactcgatggtgtagtcgatctcttcttcagtagtaaaacgacctaaagagaaacggatagagctatgtgccagctcgtcgttcagccccagcgcgcgcagcacgtaggacggttcgaggcttgcactcgtacaggcggaaccactagaaactgcgaggtctttcagcgccataatcaggctctcaccttcaacgtagttgaagctgacgttgagaatgttcggcgcaccgtgttccaggtcaccgttcaggtaaacttcttcgatatctttgatgccgttccacagacggttacgcaggccgcgcagacgttccatctcggtcgccatctcttcttttgcgatgcgataggcctcgcccattccgacgatctggtgaacaggcagagtgccggaacgcataccgcgctcgtgaccgccgccgtgcatttgcgcttcgatgcgtacgcgcggtttacgacgtacatacagcgcaccgatacctttcgggccatagattttgtgaccggagaaagacatcaggtcaactttcaactggctcaggtcgataggcagtttacccacgctctgggttgcatcaacgtgatagataatgccacgagcacggcacatttcgccgatagccgcgatatcctgcaccacgccgatttcgttatttacgtgcatgatggacacgaggatggtgtcgtcacgcatcgctgcttcaagttctttcaggtcgataatgccgttacgctgcggtgccaggtaggtgacttcaaaaccttcgcgctccagctgacggcaggtatccagtaccgctttgtgttcggttttgctggtgatgatgtgcttgccttttttctgataaaagttggctgcacctttgatcgccaggttgtcagattcggttgcaccagaggtaaagacgatttcacgcggatcagcgccgaccagatcggcaatctgattacgggcgatatctaccgcttcttcagcctgccagccgaaacggtgagaacgggaggccgggttaccaaaggttccgtccatcgtcataaactgcatcattttctcggcaacacgcgggtccaccggcgtggttgcggagtagtcgagataaatcggtaatttcattgctctataaactccgtacatcactcaatgcaaggaatcaggctaccggctggatgtacgaccgtgtttacggagtatttagcactccggcctgattctgaattctttttattaagcgcgtaacttaacgtcgatcgcgtcttgtgtgcgggtgcgtggcgcgtcgtgagtatgctgacgaccagacacatccagcacttcctggttattaaccagttcgcctaaagtaatgttgttgagaaaaccggtgagacggtcgctcaaatcacgccacagcgcgtgggtcaggcatttatcgccgccctggcagccgcctttaccctgacaacgggtggcatctacagattcgtcaacggcgctaattacttcgccaacggcgatgctgctggcatctttgcctaacagataaccaccgcctggtccacgtacgctggaaaccagaccatttttacgcagacgggaaaacagttgttccagataagaaagggaaattccctgacgttcggaaatatcagccaacggtaccgggcccgcttcagagttgagcgcaacgtcaagcattgcggtcacggcatagcgccctttagatgtcagtctcatgtcttacttcacctcaaactcgcccctgcccggggttttttattgtaaaagtgggggtattgcatagcagggtcaagtctgacattcccgagtaaattggtcaactatttacttgactgatttagtcgggtatttaaccttcagtgccatttttttatcgtggcgtttgtacctgttgtcggatgcggcgtgaacgccatatccgccctggggttctgtacactgtaggcctgataagacgcattacgcgtcgcatcaggcaacggctgtcggatgcggcgtgaacgccttatccgacctacggttctgttcactgtaggcctgataagacgcattacgcgtcgcatcaggcaacggctgtcggatgcggcgtgaacgccttatccgacctacggttctgttcactgtaggcctgataagacgcattacgcgtcgcatcaggcaacggctgttattcggccttgttacctttattctgctgctcaatagaagccagaatcccgcgcaggatattcaactcctggctttccgggcgcgcacgggtaaacagacggcgcaatttattcatcacctgccccggatggttttcacggataaaaccggttgccagcagcgtttgttccagatgaccataaaaacgctccagatcatcgaccagcggatacggcgtctcttcatgctcgacctgctcgccgttttcctgagttgccagccaggccatgcgcacttcataggcaataacctgaaccgccatcgccaggttcaggctgctgtattccgggttagccgcaatcgcgacatgataatggcatttctgcaactcttcattggtcaagccgacgcgctcgcgaccaaacaccagcgccaccggggtatttgccgcttcagcgacgcttttcaggccgcattcgcgcgggtcgagcatcggccatggcagcgtgcgggaacgtgcgctggtgcccaccaccaggctacaaccggctaacgcttcgtcgagcgtatcgacgatgtgagcattaccaatcacatcgctggcccctgctgccagggcaatcgcctgggagtcgggtttcaccagtggattaaccagccacagattggttaatcccattgttttcatggcacgggcaacagaacccatattgccggtgtgactcgtctccaccagcacaattcgaatattttgcagcattgtctttcttcatctaaagattattcacgcatcttatcataaaacgaagacagatgccgatctcgctgctatactctgcgccgttttcccgttctttaacatccagtgagagagaccgatgcatccgatgctgaacatcgccgtgcgcgcagcgcgcaaggcgggtaatttaattgccaaaaactatgaaaccccggacgctgtagaagcgagccagaaaggcagtaacgatttcgtgaccaacgtagataaagctgccgaagcggtgattatcgacacgattcgtaaatcttacccacagcacaccatcatcaccgaagaaagcggtgaacttgaaggtactgatcaggatgttcaatgggttatcgatccactggatggcactaccaactttatcaaacgtctgccgcacttcgcggtatctatcgctgttcgtatcaaaggccgcaccgaagttgctgtggtatacgatcctatgcgtaacgaactgttcaccgccactcgcggtcagggcgcacagctgaacggctaccgactgcgcggcagcaccgctcgcgatctcgacggtactattctggcgaccggcttcccgttcaaagcaaaacagtacgccactacctacatcaacatcgtcggcaaactgttcaacgaatgtgcagacttccgtcgtaccggttctgcggcgctggatctggcttacgtcgctgcgggtcgtgttgacggtttctttgaaatcggtctgcgcccgtgggacttcgccgcaggcgagctgctggttcgtgaagcgggcggcatcgtcagcgacttcaccggtggtcataactacatgctgaccggtaacatcgttgctggtaacccgcgcgttgttaaagccatgctggcgaacatgcgtgacgagttaagcgacgctctgaagcgttaatgactcaggcgggtgatatcactcacccgccctcgcctttcaggcgctattccgaaatacttcctcactgctttactttctttcgtcactctcccaccatctttccccgattaatggatgataaagaagagccaaggaaaggttatggcactgccagtgaacaaacgcgttcccaaaattctgtttattctctttgttgttgccttctgcgtttatttagtgccgcgcgttgccatcaacttcttctattatcccgacgataaaatttacggtcccgatccctggagcgcggaatccgtcgaatttacggctaaggacggtactcgtctgcaaggctggtttatcccttctagcacgggccctgctgacaacgccatcgcaaccatcattcatgctcacggcaatgccggaaatatgtccgcccactggccgctggtcagttggttacccgagcgtaatttcaacgtttttatgtttgattatcgcgggtttggtaaaagtaaaggcacgccgtcccaggccggattgctggacgatacgcaaagtgccatcaatgtggtgcgccatcgcagtgatgtaaacccacaacgtctggtgctgttcgggcagagtattggcggggcgaatattctggatgttattggtcggggtgatcgtgaaggcatacgtgcggtgatcctcgactccacatttgcctcttatgcaaccatcgccaaccaaatgatccccggcagtggctacttacttgatgagagttacagcggcgaaaattatatcgccagcgtcagcccgatcccgcttttactcattcacggtaaagctgatcacgttatcccatggcagcacagcgaaaagttgtatagcctggcaaaagagccaaaacggttgatcctaatcccggatggcgaacacattgatgctttttccgatcgtcacggcgatgtttatcgcgaacagatggtggactttatccttagcgcgttgaatccgcagaactaacccatgatcgctagcacgataatcattcacaaaaccaccttaagacatgctaatccactggtcagaacagtttaagatgagaaaaattctgtgacgcttgccaacatttctgatgattagcattcccttcgccatttccttgagcaaactttagctattcttatcaattatgcttatgggagatctacagatgatgcctacgcttgctccaccatctgtccttagcgctccccagcgccgctgccagatcttgctgacgctctttcagccggggttgaccgccaccatggcaaccttcagcgagcttaatggtgtggatgatgatattgccagtcttgatatcagcgaaacaggacgggagatcctgcgctatcatcaactcacactgacgactggttatgacggtagctaccgggttgaaggtacagtgcttaaccaacgtttgtgtttatttcactggctacgacgtggtttccgtctgtgtccgagttttattaccagccaattcacccccgccctgaagagtgaactgaagcggcgcggaattgcgcgtaacttttacgacgataccaatctacaagcgttagtgaatctctgctcccgacggctgcaaaaacgctttgaaagccgcgatattcatttcctgtgtctgtatctgcaatattgtttgctgcagcaccacgctggaattacgcctcagtttaatccgctccaacgtcgctgggcggaatcctgccttgaatttcaggtagcgcaggaaattggacgccactggcagcgtcgggcgctccagcctgtaccacctgatgagccactgtttatggcactacttttttccatgttgcgggttcccgatccattgcgggatgcgcatcagcgggacagacaattgcgtcagtctatcaaacgtctggtaaaccattttcgtgagctgggaaatgttcgtttttatgatgaacaggggttatgtgatcagctttatacccacctcgcccaggcgttaaatcgcagtttgtttgccatcggtattgataataccctgccggaagagttcgccagactgtacccacgcctggtgcgcaccacccgcgcggcgctggccggatttgaaagtgaatacggcgtccatctttctgatgaggaaagtggtctggtcgcggtgattttcggtgcctggctaatgcaggaaaacgatctgcatgaaaaacagattattcttcttaccgggaatgatagcgagcgagaagcgcagattgagcagcagttacgcgaactaacgttactgccgctcaacattaagcatatgagcgtaaaggcatttttgcagacaggcgctccgcgtggcgcggcactgattattgcgccttataccatgccattaccgctctttagtccaccgctgatctatacggacctgacgctgacaacacatcaacaggagcagatccgcaaaatgctcgaaagtgcatgatcagcaactgggaacaactttcgggcgcaaaaacattgccggaagcgccaccagcgccattacccagaacacgccgtggcccagatattgatacaggaaaccggcgaaaacggtcatgatagcgatactgccgcccatcgcgacggcagagtaaaccgcctgtaaacggatgacttcgctaccctggcgagcagcaatataacgcatggcggccaggtggcagaccgtgaaggtgccgcaatgcagaatttgcaccactatcaaccacggcaacgccgtagttgctcccataatgccccagcgcactacgccgcaaatcgcgctgatcaacagcatatcgcgtgcactacaacggcggaaaagtttattactcagcgcaaagataatgacttccgccaccacgcccaggctccacaaataccccaccgcgctggcgctgtagccagctgcctgccagtaaatggcgctaaaaccgtaataggccgcatgtgccccctgcaataaacaaacgcaggccagaaagcgccagttctggcgaaccagcgccaaccacgcagaccaaccggtgctctcctgctggcgacttgccccttgtggctgaatcgtcggacggatgagaaagccgagcagcatggatgccacgcccaacgtcaacagcgcgaggatcacccgataatcaaacatagtgaccagtttgcccgtcagcgcgctgccaatgacaaacgccacgctgccccacagtcgcactttgccgtaatcaagcgggaactgcttttgccacgtattcgccagtgcatcggtcaacggtaccagtggactgaaaaagaggttaaagccaatcatcaccagcatcagccacgctacgtgcgcccccgcccagaaggcgacagcaaagagaagtgtcagcagtgccagcacgcgcaaggcggaaatcaggcgggaaggatcgctgacgcggggcgcgatgagcaaactcccgaggaaacgggcaaccagacctgcccccaataacaggccgatggtttctggcgttaaaccaatccctttaagccagacgctccagaaaggtagaaaaatgccgtaactaaaaaagtatgtgaaatagccgagcgccaaccagcgcgtggattgcaaaaccatgagtccctcccgtcaggaggcgttagtctggggttaatcgaatgttggtgcaagttgaaaaataagaatattcgagcctgcttcccgatgtctgtaacgccagttcacaagcactaaaaaactgagatccgcgacgcatgttgcaaaaataatgcgtaattatgccgttacgcttgccaaacgttcctgcacaatggcgatgaaatcgcgtaatgccggcttcatctcccctttcttccacgccatcagtaaagcaatggaaggcacatttccggcaatgggacgaaaaacaacctgtccggtattaaaattattcatataaccgggtatcaaagtgacgcccagccccatgcccaccagattcatggtcaccagaatattcgttgccacctggacgatatttggctggctgttttcttgcgcaaaccacgctttaacgatcggcgcaaggctaccggaatacaccggatcggtactgacgaaattcacgccatccagttgcgcggcggtgatctctttttcatgtgctaaagggtgatcaaccggtaacacaaccactaatggttcgtcaaaaagctccagataatcaatctccgggctataaacaggatggcgcattaagccgacgtcgagttcaccacggcgaattttttcctcctgttgcgtggtgattaaactcaccagctcaatcaaggtgtctggctgtctgagacgaaacatcggtaatacttttggcagtaaattcacttccgcgcttggcacaaagccaatggttaattgtctgtcttcctgaacaattttccgcgcccgtaatttggcattttccgcttgttcgaggattgccagcgcgtcctggagaaaacattctcccgccgccgtcaacgcgactttgcgcttatccctcaccagtaacggaacaccgacacagttttcaagatcgcggatctggctgcttaagctaggctgactggtatgcagtttttccgccgcacgggtaaagttcagtgcctgcgccactgcgacgaaatagcgtaaatgccgtagttccatcaccttccccttgttatcgaaaaaacgtctcagctggtagaaattaactatttcacatattagcaaccaaccagcaacatccttatggcacaaaaatagaaggtcaatacatcttatctttcaggattaaaaaatatgaccacacccagtgatttgaacatttaccaactgattgacacccaaaatggtcgggtcactccgcgtatttataccgacccggatatttaccaactggagcttgagcgtattttcggtcgttgctggctatttctcgcccacgaaagccagatcccaaaacccggtgatttctttaacacctacatgggagaagatgcggttgtcgtagtgcgtcagaaagacggcagcatcaaggcgtttctcaaccaatgccgccaccgggccatgcgtgtgagttatgcagattgcggcaacactcgcgcctttacctgcccgtatcacggctggtcttatggcattaacggcgagttgatcgatgtaccgctggaacctcgcgcctacccacaagggttgtgtaaatcccactggggactaaacgaagttccttgtgtggagagttataaagggctaatttttggcaactgggataccagcgcaccgggcctgcgtgattacctgggtgacattgcctggtatctggatggcatgctggatcgtcgcgaaggcggcaccgaaattgtcggcggcgtacaaaagtgggtgatcaactgtaactggaaattcccggcagagcagttcgccagtgaccagtatcatgctctgttcagccatgcttctgccgttcaggtattaggggcgaaagatgatggcagcgataagcgcctcggtgatggacaaaccgcccgcccggtgtgggaaaccgccaaagatgcgctgcaatttggtcaggacggtcacggtagcggtttcttctttactgaaaaaccggatgctaatgtctgggtcgatggcgcagttagtagctattaccgcgaaacctatgccgaagcagaacaacgtttaggtgaagttcgcgccctgcgcctggcgggtcataacaatattttccccacgcttagttggctaaacggcactgccacactccgcgtctggcatccgcgcggccctgatcaagttgaagtgtgggcgttctgtattactgacaaagccgcctccgatgaagttaaagccgcttttgaaaacagcgccactcgtgcttttggtcctgctggttttctcgagcaggatgacagcgagaactggtgtgaaatccagaaattgcttaaaggccaccgcgcccgcaacagcaaactgtgtctggaaatggggcttggtcaggaaaagcgccgcgacgacggcattcctggcattactaactatatctttagtgaaactgccgctcgtggaatgtaccaacgctgggccgatcttctgagtagcgaaagctggcaggaagtgctcgataaaaccgccgcttaccagcaggaggtgatgaaatgagtgcgcaagttagtctagagttacatcaccgcattagccagtttctctttcacgaagccagcttactggacgactggaaatttcgtgactggctggcgcagctcgacgaagagattcgttacaccatgcgcaccacagttaacgcgcaaacacgcgaccgccgcaaaggcgtccagccaccgacaacctggatttttaatgacaccaaagaccagctggagcggcgaatcgcccgtctggaaacgggcatggcctgggcagaagagccgccgagtcgcacccgtcacttaatcagcaactgccagataagcgaaaccgacatcccaaacgtatttgctgtgcgggtaaattatctgctttatcgggcacaaaaagagcgcgatgaaacattctatgttggaacgcgtttcgacaaagttcgccgtctggaagatgacaactggcgcttgctggaacgggatatcgtcctggatcaagcggtaatcacttcccataacctgagtgtactgttctgatgaatcgaatttatgcgtgtcccgttgcggatgtgccggagggtgaggctctccggatcgataccagccccgtcatcgccctgttcaacgttggcggcgagttttatgccattaacgatcgttgcagccatggtaatgcgagtatgagtgaagggtatctggaagatgacgccacggtggagtgcccgctacacgccgccagtttttgcctgaaaacggggaaagcgttatgcctgcccgccaccgatccgctcaccacttatccagtacacgttgaaggtggtgacattttcatcgacttaccggaggcgcagccatgagcgatctgcataacgagtccatttttattaccggcggcggaagcggattagggctggcgctggtcgagcgatttatcgaagaaggcgcgcaggttgccacgctggaactgagcgcggcaaaagtcgccagtctgcgtcagcgatttggcgaacatattctggcggtggaaggtaacgtgacctgttatgccgattatcaacgcgcggtcgatcagatcctgactcgttccggcaagctggattgttttatcggcaatgcaggcatctgggatcacaatgccagtctggttaatactcccgcagagacgctcgaaaccggcttccacgagctgtttaacgtcaatgttctcggttacctgctgggcgcaaaagcctgcgctccggcgttaatcgccagtgaaggcagcatgattttcacactgagtaatgccgcctggtatcctggcggcggtggcccgctgtacaccgccagtaaacatgccgcaaccggacttattcgccaactggcttatgaactggcaccgaaagtgcgggtgaatggcgtcggcccgtgtggtatggccagcgacctgcgcggcccacaggcgctcgggcaaagtgaaaccagcataatgcagtctctgacgccggagaaaattgccgccattttaccgctgcaatttttcccgcaaccggcggattttacggggccgtatgtgatgttgacaagccggcgcaataatcgcgcattaagcggtgtgatgatcaacgctgatgcgggtttagcgattcgcggcattcgccacgtagcggctgggctggatctttaaggaagcacgatgaaagaaaaaacgatcattattgtcggtggcgggcaagcggcggcaatggctgcggccagcctacgccagcaagggttcaccggtgagctgcatctgttttccgatgagcgacatcttccttatgaacgacctccactcagcaaatccatgttgctggaagattccccgcagttacagcaggtgttacccgctaactggtggcaggaaaacaatgttcatctgcattccggtgtaaccatcaaaacgctgggtcgcgacacacgagagttagtgttaaccaacggcgaaagctggcactgggatcagctttttatagcaaccggcgcggcagctcgaccgctgccgttgcttgatgcactgggagaacgctgctttaccctacgccatgccggtgatgccgccagactgcgagaagttctgcagcccgaacggagtgtcgtgattatcggtgccggaactattggtctggaactggctgccagcgccacgcagcgcagatgtaaggtgacagtgattgaactggcggcaaccgtcatgggccgtaatgcaccaccgcccgtgcaacgctatcttttacagcgccaccagcaggctggtgtgcgcattctgctcaataatgccattgaacatgtggtcgatggtgaaaaagtagaactgacgctgcaaagtggggaaacgcttcaggctgatgtggtgatttacggtattggtatcagcgccaacgagcaactggctcgcgaggccaaccttgatactgccaatggcattgtcattgatgaggcttgccgcacctgcgatcccgcgatctttgccggtggcgatgtggcaatcactcgtcttgataatggtgcactacaccgctgcgaaagctgggaaaacgccaataaccaggcgcaaattgccgctgccgcaatgttagggctaccgctaccgctactgccgccgccgtggttctggagcgatcagtacagtgataacttacagtttattggcgatatgcgtggcgatgactggctttgtcgtggcaacccggaaactcagaaggcgatttggtttaatctgcaaaacggcgtgcttatcggtgcggtcacgctgaatcaggggcgtgagattcgcccaattcgcaaatggatccagagcggcaaaacgtttgatgcgaaactgctgatagatgagaacatcgcgcttaaaagtctgtaaccaggataattagcgaatatctcaatgcctggggcgtggcgaggtgcaagagtgtgtattacgtttaaaagtcattatcttgcaaagggattggttatgaacacactacgttattttgattttggagctgcccgccccgttttgttattaattgcccgtatcgccgtggtcttaattttcattatttttggttttcccaaaatgatgggctttgacggtacggtccaatatatggccagcttgggcgcgccaatgccgatgctggcagcgattattgcggtagttatggaagtgcccgccgcgatattaatcgtgcttggctttttcacccgtccgctggcggtgctgtttattttctacacgctgggtacggcggtgattggtcaccattactgggatatgaccggcgatgcggttgggccaaatatgattaatttctggaagaatgtcagtatcgctggcgcgttcttgctattggcaattaccgggccgggggcaatttctctcgatcggcgttaagaaagatgccggatgcggcgtgaacgccttatccggcatttaataaattacagccactctacccgcaagctcatctcactagttgtactttcccctggtgctagcgcaatgagatcacccccttccgggcgatgatgatcatccggcgcatggctcatcggttccagacagaagaaatcaaacgcatatcctttatcaaacgcagggtcggaaacaaagatgaaataacacggtgcaggtggcgtcgtttccatgatgatggcataaccttcctgcggctgctcgatgcgggcctgaccattccatccggcaaaaccattgttcacccactggcgcggcaacggcgcgggctggttaaaatccagttcctgcggtagctgctcgcaaaactcacccgccagccactgctcccgctccagccagtaaccgctcgcctgtgcctgaatccgcgtttgcgggctcaacggaaaataaggatgccagccggtaccaaatggcagcgtctctgccccttgattggtgacagagagcgtcaccgtcagcgtatccgccgttaaatgaaacgcctgacttacccgatagtgatagacaccgctgcgatgttcatacaccagacacaaactatcatcgctgtggctgacacattgccactcgcccagccagccatcgccgtgtagatagtgcgcatcccactcaacattcggttgcagttgatactcacgcccctgccagacaaaacgattgccgctcacccggtttgcaaatggcaccagcggaaaacaactggcatcggttgccacaccgctttttttaccaggacgtaagagcggcgtcgtatcgcgccagaagccttcgattacgccgccctggtcagaaacgtccagctttaggctcccgtgggataaggtatagatggtcatccgctaactccttaatccgggaagttaatcacaactttcccgcatttgccgctcgccatcagcgcataggcatcacctgcctgttccaggctgaagcgatgggtaatggcgttacgcggccacagcttccagtccgtcagatcatgggcgcatttttccatatggaacagactggtcacccaggagccgataatccgccgttgatggtgcatcagatcggcgctgacctcgaattccacttttccggtttcaccaatgtaaaccacccgtccccagtcagcggtggattgcagtgccagcaagcgacctgcggcattaccggaacaatcgagcgcaacatccgcgccaccgtgggtgagttcggcgataatctgcggcagaccttcggtggttgctaaatagccgtgatccatcacccctaactgttttgccatcgccagacgttccggcagcatatcaacgccgatgatccgttttgcaccgcgacctttcgccagcatcatcgccatcatgccgactggccccagaccgaccaccagcacgttatcactgccggaaacttcgccgcgcaaaattccttcatacgctgtaccaacgccgcaactgataaacgcaccatcttcgtagctcagcgcatccggcaggaggatcagatctttttcttccgccagcaagtattcggcatgaccgccgtcacgctgccagccgtaagccgcttttccttcgccagtacaagaaataggaaaaccgcgacggcagttcgggcaaaaaccacagccagaaatgtgatacaccagcacgcggtcgccctctttaaaatggcggcagccttgccccatcgccacaatctgcccgcacggttcatgaccgttgataaagccctggtataacggtttatcgggtgccgccgctgtggcacggtgttgatgatagatatagtggacatcgcttccgcaaatcccggaggatttcattttgatcagtacctggttaatccccggcgtcggcaccgcaacttcccgcagatcgacggtgctatttcctggtaaataagctgccagcatcgttttcataaatccctcattaacaatacgattaattttcatccctgccgcacccgcgccaggggcgttaaggtttagcgtttcgctttactgcttcgctgggtcagcaagatattcgccagcaccgccaccacgatgatgacgccgcgtaccacctgctggaaaaaggagttaataccgagcagcaccagaccgttaccgattagcgtaatcaccagcacaccaagcaatgtaccgaacagggaaccgcgaccgccggaaagtgccgtaccgccgaccacgaccgcggcgatgacgtcaaactccagaccgtttgcggcacctgcgttaccagaaccgaggcgcgccgccaacaaaatgccggtcaccgccgctaataatccgctaagggtaaagataagaatgcgcacccgacgaacgttgatgccgcacaactgcgccgccgtagcattaccgccaacggcaaaaacgctgcgcccgaaggcggttttgcggctgatgaacacaaacagcgcaaacaacacaatcatgatcagcgcggataccggcacaccgagaaattgtccgcccagccagtccagcacctcgttttcatcaatcggcactggcagtgcgttcgtcataaacagccccattccgcgcagggcgctccacagccccagtgtggcaacgaaacttggtacattaaacacgccgcgcagcaccccggccagcgttcccatcagcgcgcctaacagcaacaccagcaggcacgccaccgccagcggaacttcaaattgcagcaaaaatgccaggcacacgctgacaaaagccaccatcggcccaacgctgacatcaatttcaccggagataataatcagcgtcatcgcccaggcggcaatcccaatggtggcggcatcgcgcagcacgttcatctggttattcaaactgataaagccaggcgcgttcagggagaagaccagataaagaatggcaatcaccaccagcaaaccgatctcattaatatggcgactgacaaattgtttgaggctgacgctcttgccctgcggcaatggtaaactgctagcagacatcttcaggttcctcggtaaaattcatcagtgcacagacagaatggcggacatcagctcatccacattgaccggagcgtgaaactcctggctgaacgtgccgtgctgtaataacaggatgcggtcacacaccagcggcaactcctccacttcactggagataaacaccacgctttttccttcggcagccagctcacggacaatacggtaaatctgctgtttggcttcgatatcgacgccgcgcgttggctcgtcgagcaacaaaatctggctggcagcatagacccaacgaccgatcaccactttttgctgattgccaccagaaagcgtgccgatgggtgtttcgctactggcggccttgaccgtcatccgctgcatcacctcttcggtcaggcggcggatggtggaccattgcagcacaccgttggcgctgattttttgccgattggtcagcactgtattttcgtcaacgcccaaccagggaatgatccccgcttctttgcggttttctggcgtatagccaatgccgcgtttcagcatgtcgccgtaatcggggcgcgtgattttctcgccgttgataacaatttcgccctgttcatactcctccagcccaacaatcgccttcagcaattcactgcgccctgcccccagcagaccagcaatgccgagcacttcgccacgacgtagcgtaaaactgatatcctccagcttgggcttatggcgtaacgcacggacttccagcacggcctgatccacaatttcctgaggggctaccggcgcaatatcaacgtgatcgcgcccgagcatcaggctcacaatatgatgcgtggaggtgttttcgagcatcacatcgcccgccacctgaccatcgcgcataacggtggcacaggaggcaatgcggcgaatttcttccatccggtggctgacataaatcaccgccacgcccagtgcgctcatctttttcaccgcgctgatcaccagttcaacttccgcactcgcaaggctactggtaggttcatcaagaatgaccacgcgcggctcgcccttcatcacccgcgcaatttccaccagctgcttttgcgccgggcttagcgtactaacaagttgttcaggactaacgtcaacgcccagcgcctgtaagcaacgttgggcatcctgcgccatttgcaggtaatcaatcatgccgttgcggcggggccactgaccgaggcagaggttttccgccactgtcagcccttccaccagacttaactcctgataaaccgcgcgcacccccagttcagcggcacggcgagtcagcgtagcttcgtcaccttccagtcgcgtctcgccaatccagatatcaccgctatccgggcgttcgctgccggtaagcattcgaatgagagtgcttttgcccgcgccgtttttacctaacagcgcacgaacttcgcctttattgagcgtgaagttaacgttatccagcgcaacgacgccgggataacgcttatttcctgccaccacttttgctaccgggactgcctctgttgccgtgaacatagggacctctgcgaatcagcgattagggcagaccatcaacgtgcgttgccagccactgtttaccgtcttccgttttggtatagagatcgataggcacctgaatcactttttcaccgtcggcttgtttattgataaccttcaatgtttgcgcgaaaacagcattgcccattttcttaccggaaatatccactaccgctttcagcacctgattgttttccagctcctgagcaatttcggttgtcatatcgctaccgaaaacagcaatttttccggcctgattttgattacgtaccgcttttaccgcgccgagtgtcgcaccgccgctttcccccataatggcgttgagatccggcgtggagataattagtttttcaccaacggaaatcgctttatctaaaacagtcccttcctgattagcgacaatttgcgcgccgggaacgcgggattttaaaacttcttcaaatcctttacgtcgctgcacacaaacttcaaaggcttcgcaattgatgacggcaattttcggctggtcaattttattggcaataaaataatcagcggcagcgttacccagttttttaccaaattccagcggatcgccgaccagatacgcgctgacatatttatcgacccccttttgattaatacaggtgttgtagcaaatcaccggaatgcccgcttcactggcgcgacgaacggtacggctactgccattttcagacactgcgcttaaaataatggcatcgacattacgcgccacgagggtatcaacaaaggtactttctttgctaatatcaccctgggcgttagtttctattaactgaacttgtacactggaatcttttgccgcatcctgaacgccctgacgcactccagcgtagtatccctgagtatcaaggtatattgcgccaatggtcatttctttttccgcagccctggcaaatagtgcgctacctaatagcgtagccattaataatagattacgggttgttctcatttttgtaggcatagagcctcctgtagggtttttattaacaacggcttattctaattattttgtgatgagcggcagcgcgtgccgctcaaatattacagttaatagggtttagtgaacgcggttaaaaataaaaggcatcacggtggtgaataatgccgctttcggccaagccggattaatcgccgtcaattcagcgcgagcagactcatattgcgcaacctccccgagtcccgcggacgccagcatcgccaccatcaggcatttttctttatgctgctgttgtaaatcgccatacaggctcaacaagtcaggttggctgacggcaaagaaatccgcttcgatactggttttcgccatctcttgcgcccactgtttcatttcactaaacagttgctgtgcggtttgttgttcgcccagcagtcgcagcgccatcccttgccagaagagataatcaaccggctgatcgttgtaataactgtgaatgttaatagtgcgatcgccggtcgccgccagacgtaaacaacgcgtcgcttcagtttcatcgccctgcgcgttggcgcatatcgcctgccagaaccagatgtcgttatcagtttgccccggtaaacggccttcgcttaaattctccggataatgcagcgcggcatgaagcagttcgcaggcctgctgcggctgtctggcatcaagatgctgccaggcgcgtaataactggttgaggataaactgactggtgaccttcccttccccgccttcccacgggtggaatttgcgcgtggcgagaatgtccgccgctttgtctgcctgacccgtgagatgccacaaattgagcagttctgcggtcatgtcgtcgcgtttcagcgcaatttccagattattttccagacgcgccagtcgtttctccggtgtggctccacttaacttatccagcaaatcccgttcgaaaagcagacgtgcatcctgcggcgcaagctgataagcattatcaagataacgcgcggccagctcataatcgtgttgcttattccacgcatggatcgctaacccgcgccagccgtcggcaaactccgggctcatctctacgcaacgttgccaaaaggcaatggctttgttgtagctacgtttgttgtagtagaagcaagctagtaaatggcgagcaaaccagcactcttcaatactctccagcgccgccacttcttccagcgtattcgggaaacggacaaactgcgggaagacatcaatggcttttgcgaccagttcgccacgttcggctttcggcagcaagctggcttgcaggtaaagcggcagcgtgcgctggcagtccagtgcgttcagcatctctgccgccagggtgggcattccccagttaatcagttgcccggcggtcatcagggcgttaacgtcgcgtccctgacacagaccgcgccactgcgcgagagcactttcgctacgaccatcgaaccagttcagccaccacagagtggcgttcagcggataatcgcgcagcagtttctcgcgctgcacacgcgcgttgtcctgacgaccacttaacaccagcagcagattatgcaggcaaagcacttcctgattggttgggcaggcgcgaagactttgttggcaaaaatccagaccagcgtcgaagttaccattacgcgccgccagtcgtgccaggccataatagccaccggctttgctgttgccgctccagaccgcacgccagaaatcctcttcggcttgttgatattgtccctgacgttcgtaagcactggcgcgaatcaaactcgcctgtccgcactgcggatttttgttcagcgcatgtgcgcgtttcagagcctgagtggcatacgccaccgcttgcgggaaatctgcgcggttatattccagcatcgccagcgccaggttacagcgataatccagcgggtccagcgccacgccgcgcaggtagtaatcgaacggactacggctggcgtgatgatattgctccagatgctgaccgataaaccaggcttcatctgtactggtaatgtcttgtgctgccagtggcgctttggcgacgtccggtaacggcaacgcttgcggctgatgttcctgataactcagtacaatattgccgtcggcatcggagagctcaatggtcagcctttcaggattgataccgtgcaacacgccctggatggcggtcgcaggcatcagtgccacggcatcatcaagtaacgcgttgcatttaccgatttcgcggatcgccaggcggtatccgttcaacggagagatggcatacagcccccactcaatcccccgcttactacgctggagttttatcaccgcatcgcgggaggcattttgcaccatgcccaaagaatgataaggcaggaaatactgctcaaaacgcttctcttcgtaagcatcaagccaggtaaaatcgggctggttatcggcaaaaataccggtcatcagttcgatatacgggccgttattgtcggtcagactcttatcccacgcctggccaaattcactgtgtccccaactccactgttttttacctggcgcaatatggtggttggcaacgtgcagcaaaccgccatcttcatcgtgacaccacgcgccgacaaaatcgtactggcttttttcggccatataactggttggaacaggcacatttttatagcgagaaatgtccactccagcggagtagtccactttgtagtaagtgccggtagcgatggggaaagcggagacggcccgtttgccgtgatcaaacaccgccgttacatccggcgggaagacgctctgatgcccttccccccctttcactgccgggttggcccaccacaagaaatgacgcggcgtggcgttcccgttatagacgcggctggcgatttccagcgccgcccggtcagggcgcagggtgaaacctgtcatcacctgtaaaccatgcatcggctccgtttcgcctacccacaccgtctgtgcaccgtcttcatgggcttcgagggtgaaatcaacgggcataaaggtggtcgggcgatgatgttgcggccagttaaactcaatcccaccggaaatccacggccccagcagccccaccagcgcaggtttaatgacttcattgtgataaacaaaatcgcgctgtttcactttatcccacgcgcgatgcacccgaccgcccagttccggcaggatcatcactttgatgtagtcgttttccagccacaccgcctgccaggatttcagggttttctgctcgctcagcgtatcggtcacgccgtagggataaaccgcgccggagcttccctgataaacgcgattttccaggaacatgggatgtatatcctgcggcccggtttcataggtcgggatctcaacgcgctcttgccacacttttactggagtcatggtgccctcaatattaacaagacatactgaattaaaagatttgtggcagtgtattgaacaatctggcaatgttttcgcggaataatcacgcaattaactaaacaaggtttagtgaagatgagagcctgcattaataatcaacagattcgccaccataacaaatgcgtgattctggaactgctgtaccggcaaaagcgcgccaataaaagtacgctggcccggctggcgcaaattagcattccggcagtcagtaatattttgcaggaactggaaagcgaaaaacgggtggtgaatattgacgatgaaagccagacgcgcgggcatagtagcggtacatggctgattgcgccggaaggtgactggacgctgtgcctgaacgtgacgcccaccagtattgagtgtcaggttgctaatgcttgtttaagtccgaaaggtgaatttgagtatttacagattgatgcaccgacgccgcaggcgctgctgtccgaaatcgaaaaatgctggcatcgccaccgtaaattgtggccggaccataccatcaacctggcgttggcaatccacggtcaggttgatcctgtgaccggcgtgagccaaaccatgccgcaagcgccgtggacaacgccggtggaggtgaaatatctgctggaagagaagctcggcattcgggtgatggtcgataatgactgcgtgatgctggcgctggcggagaaatggcaaaataatagccaggaacgggatttctgcgtgatcaacgttgattacggcattggcagcagcttcgtgattaacgagcaaatttatcgcggcagtttgtatggtagcggacagattggtcacaccatcgttaatccggatggcgtcgtctgcgactgtggacgttatggctgcctggaaactgtcgccagcttaagcgcattaaaaaaacaggcgcgggtatggctaaaaagtcaaccggttagtactcaacttgatcctgaaaaactgactacagcgcagttaatcgctgcctggcaaagtggagaaccgtggatcaccagctgggttgatcgctctgccaatgccattggtttgagtctgtataacttcctcaacatcctcaatattaatcagatttggttgtacggtcgcagttgtgcctttggtgagaactggcttaatactattattcgccagacaggatttaacccgttcgaccgcgacgaaggaccgagcgtgaaagcgacgcaaattggctttgggcaattaagccgcgcacaacaggtgctgggaattggctatttgtatgttgaggcgcagttacgacagatttgatggcgcgataacgtagaaaggcttcccgaaggaagccttgatgatcataaacgaaaaattgcctgatgcgctacgcttatcaggcctacacggagattgcaatatattgaatttgcaaagttttgtaggccggataaggcgttcacgccgcatccggcatgaacaacgagcacattgacagcaaatcaccgtttcgcttatgcgtaaaccgggtaacgtgcgcagatgtcgagaactttacctttgatgcgctcgataacggcttcatcattgatgctgtccagcacgtcacacatccagccagccagttctttcgcttcggcttctttaaagccgcgacgggtaatcgccggagtacctacacgaataccggaggtcacaaacgggctcttcggatcgttcggtacgctgtttttgttgacggtgatgttagcacggcccagagcggcgtctgcttctttaccggtcaggtttttatcaaccagatcaaccaggaacaggtggttatcagtgccgccggaaaccactttgtagccgcgctcgaggaacacttctaccatcgctttagcgtttttagcgacctgctgctggtaagttttgaactcaggctccatcgcttctttcagagcaaccgctttaccggcgattacgtgcatcaacggaccgccctgaccaccagggaaaacggcagagttcagttttttgtacagctcttcgctaccacctttcgccaggatcaggccgccgcgcggacccgccagggttttgtgagtggtggtagtaacaacgtgagcatgaggaaccgggttcgggtagacgccagcagcaaccaggcccgcaacgtgcgccatatcaacgaacaggtaagcaccgatgctgtcagcgatttcacgcattttcgcccagtccaccacgccggaatatgcagagaaaccaccgataatcattttcggcttgtgttctttggcttgtttttccagatcggcgtagtcgatatgaccggtagcatcgataccgtaaggaacgatgttgtacagtttaccggagaagttaaccggagaaccgtgagtcaggtgaccgccatgcgccaggttcatacccagaacggtatcacctggttccagcagcgcggtgtagaccgcaaagttagcctgggagccggagtgcggctggacgttagcgtagtcagcgccgaacagttctttcgcacgatcgatcgccagttgttcaacgatatcaacatactcgcaaccgccgtagtagcgtttgcccggataaccttcagcatatttgttggtcagctgagaaccctgcgcctgcattacgcgcgggctggtgtagttttcggaggcgatcagttcgatgtgctcttcctgacgtactttttcctgctccatagcctgccacagttcggcatcataatcggcaatgttcatttcacgctttaacatccgcatctcctgactcagctaacaataaaatttttggcctttataggcggtcctgttggacaacggcgaacagtataaccgaatcattgtgcgataacaggtcttgacaaaggaatttacgcaaacgattaccttcaggctacgcaaggctttggagaataaagagcttgcaaccggaaacggatttcttttcaggtttgtgatgcaaatttttcacttcatcacattctttctgaaaaacaccaaagaaccatttacattgcagggctattttttataagatgcatttgagatacatcaattaagatgcaaaaaaaggaagaccatatgcttgacgctcaaaccatcgctacagtaaaagccaccatccctttactggtggaaacggggccaaagttaaccgcccatttctacgaccgtatgtttactcataacccagaactcaaagaaatttttaacatgagtaaccagcgtaatggcgatcaacgtgaagccctgtttaacgctattgccgcctacgccagtaatattgaaaacctgcctgcgctgctgccagcggtagaaaaaatcgcgcagaagcacaccagcttccagatcaaaccggaacagtacaacatcgtcggtgaacacctgttggcaacgctggacgaaatgttcagcccggggcaggaagtgctggacgcgtggggtaaagcctatggtgtactggctaatgtatttatcaatcgcgaggcggaaatctataacgaaaacgccagcaaagccggtggttgggaaggtactcgcgatttccgcattgtggctaaaacaccgcgcagcgcgcttatcaccagcttcgaactggagccggtcgacggtggcgcagtggcagaataccgtccggggcaatatctcggcgtctggctgaagccggaaggtttcccacatcaggaaattcgtcagtactctttgactcgcaaaccggatggcaaaggctatcgtattgcggtgaaacgcgaagagggtgggcaggtatccaactggttgcacaatcacgccaatgttggcgatgtcgtgaaactggtcgctccggcaggtgatttctttatggctgtcgcagatgacacaccagtgacgttaatctctgccggtgttggtcaaacgccaatgctggcaatgctcgacacgctggcaaaagcaggccacacagcacaagtgaactggttccatgcggcagaaaatggcgatgttcacgcctttgccgatgaagttaaggaactggggcagagtctgccgcgctttaccgcgcacacctggtatcgtcagccgagcgaagccgatcgcgctaaaggtcagtttgatagcgaaggtctgatggatttgagcaaactggaaggtgcgttcagcgatccgacaatgcagttctatctctgcggcccggttggcttcatgcagtttaccgcgaaacagttagtggatctgggcgtgaagcaggaaaacattcattacgaatgctttggcccgcataaggtgctgtaatttgatgttgccggatggaaacatccggcaacccttgacgcggtttaaattgccgcgtcgtcctcttcaccggtacggatgcgaatgacccgtgccacgtcaaagacgaagattttaccgtcaccgattttgccggtttgcgccgtgcgaataatggtatcgacacaggtatcgacaatgtcgtccggtacgacaatctcaattttcactttcggcagaaaatccaccatatactccgcgccgcggtacagctcggtatggcctttctggcgaccaaagcctttcacttcggtcaccgtcatgccggtaataccgacttcggccagtgcttcgcggacatcgtccagcttgaagggttttataatcgcatcaatctttttcatgctattccttgaaaaggtcgcctgtcttttgatctgctaaacgtaacacataacgccaattcattccttgaaatcgtttgcatccagctcgtgtcgggaaagcagtttataaaattctgtccggttgcgccccgccattctcgccgcgtgggtgacgttgcctttggtgatttgcagcagcttacgcaaatagttgagttcaaactgattacgtgcctcaacaaaggttggcagcgccgtattttcaccctccagcgcctgctccaccagcgcatcactaatcaccggagaactggtcagcgccacgcactgttcaatcacgttgaccaactggcgcacattacccggccagctcgcggtcatcaggcgtttcatcgcatcggtagagaacgcgcggacaaacggtttatgtcgctctgccgcctggcgcaacaggtgatttgccagtagcggaatgtcttctgtgcgctccgccagtgccggaattttcaggctgacaacgttgaggcggtaatagagatcttcgcggaattccccgcgcgccatcgcttttggcagatcacggtgagtggcagaaataatccgcacattgatatcaatatcgcggttactgcccagcgggcgcactttacgctcctgcaacacgcgcagcagtttgacctgtaacggcgcaggcatatcgccaatttcatcgagaaatagcgttccgccttccgccgcctggaataaaccttcgcgattgctgacagcgccagtaaacgcgccacgcgcatgaccaaacagctcgctctccagcaattgctcgggcaatgcgccacagttaatagcaataaatggtttgctgttgcgcgggctggcgttgtggatagcctgggcgaaaatctctttcccggtgccgctctgaccgttaatcaaaacgctgacgtcactttgcgccaccagccgcgcctgttccagcaaacgcagcatcagcgggctgcgggtgacaattgcctcgcgccagcgttcatcggtggctggcgcggattgctccagcgcatcgtcaattgcctgatatagcgcgtctttgtcgacaggcttggtgaggaaactaaaaacgccctgctgtgttgcagcaacggcatcgggaatagaaccatgcgcggtaagaataattaccggcattcccggctgcactttctggatttcagcaaacagctgcataccgtccatttcatccatccgcaggtcgctgatgactaaatctactttttcgcgattcagtacccgtaatccttcagcgccactttccgccgtgaccacactgtagccttcgctggtcaggcgcaggccaagcagtttcagcaatcccggatcgtcatcgaccaataataaatgcgcaggtttatggctcatcaggagtgacctcatgggtggatggcgcgggcttttcactctcgtgcggcgtatccgggctgaaatttccagccggtttgcgggtgctgagctggcgttcaatatcggtcaggttttccagcttgcgggtggtgagttccagttgctgctgtagaacgtgatgttgctggcgcaatgtatccagctcgctgtcgctggactgctggagtttactgtaacgttggcgctcttccgccagttgcagttgcagcgcctgaccatcgcgccagagttgatacagtgggcgaacctgtgccgggatctcggtacttaacgcttcaatacgcgcgaccagctggcggcgctcatacggcgtaattttggcgtcggcgagcaaaatcccttgtttaaaggtattttgccagctgccgtcgtcatattggcgagcttgctgacggctctgcgcaggcattaaacgatcagcacaatccatcgcccgcagccagtaaagcggattggtttcggtacttttaccttgcagcgcccagatgtcgctacattcagtagaaagatagtcagccagttgataaaccggaattttttcttctgctggcgtatcaatggctggcttattgtgattctgcacgcaacccagcaatgccagacatggcagccctgccagccacagccgtcggggcaataatcgttgaaaaatgtgtcgcatattcaccagacttaaagcctatcccagtgggcgtaattgttgcagacagtctggacatggacagcgcggagaaaccggagcgtacatatcgtacgtgaagatttcgagcactgcccggggccgaactgacaaataaaatagcctgataggataggctgttagcattatttcgtgtttttgctgctcggtaattcaatgcggaaacaaacgtcttgcccgctctcgtcgaccagatacagttccccttgcatacggcgaatacaatccctggcaatgcttaatcccagaccgctgcccttcaccgccccttttcgctggtggcttccctgaaaaaagggttcgaagatcatggcgcgttcctcttgcggaatgggcgtgcctgtattgatgacatcaatataaacccgcgcaccatgtaaactgctgcgaaggcaaatgttaccggattcagccccgtagtgcaccgcattggagtaaagattatccagtacgctcatcagcagcattggctccgccaggcaagctgttgctttgagatcgacgtcggtatgcatcattttagcccgtgcgggcaggctatgagcagaaaccactgtctccaccagcggtgctaactcaacattctccagttccaccgcactgtccgcctgtttacggttgtaatcaagcagttgttcgatcagtttttgcaaattgcggctgctgctatcaagaatgctcaccacctctttttgctctggcgtaagcggcccgacaacctggtcagccagtaattcagtgccctcgcgcatactcgccagtggcgtttttaattcatgagataaatgtcttaaaaattgatggcgttgggattccagccaactcaggcgctcacttaaccaaagaatacgttgcccaacgctgcgtaactcgctcggtccactgaagctgacgctattgcccagagaacgcccttcccccagacggttgatcatgcgctcgatatttttcaccggcccgataatcatccgcgtgaaaagcagtaccattaccagactcaccagaaatagcaccaggctttgccaaccaaaatattgcccacgttcggcgatttcacgctgaagctgctgcccacgagagaacaccactgtgcgcgtggcctgtaccatttcggtattggcactggcaaaggcttcaagacgtgcggcggcggcagcatcgggaccgctgttgttacactgaagttgagccagattgtgcaaatcctgacgtaatgcctggtagagtttatcgtccggcagcacgcctgcgtgggcatcgagcatttcgctgtaacgcttgcgctggctttgataaaccttcgccagggttgggtcgtccagcacgcaatactgacggtaactacgctccatctccagcgccgcgttggtcatcgcttcactgcgccgggcatcaataagcgtagtgcggttaaccagcgccgcctgatcgctaagcgcattcaggctttgccaggcttgccatgccagcaccaacaggggcagcagaatcagcaaaaatgccagcattaccagttgtcgtaaactgcggggaaaaacgggccagcgtttcaaggtgttactctcgtcagacgcgaatagcctgatgctaaccgaggggaagttcagatacaacaaagccgggaattacccggctttgttatggaataaggcggtgcctaactcgacgtttcgcccgatggttgatatagctacgctgatatcagaagttggacggcaggcaccttgttgtgcgtcattcgtattttatgtagcacgtcccgaaggggctgacataagtcggtgaatgagccactggttactattatgcagtaactgtgccaataaagaaaatagtttggtaacgtactgattatacgttgctttgaggggtttatgtctcctccgctgtttgaatgtaaatcagccactgtgtcgctaaaaagagacaacttaagataaacttattagataatattaaaatcaatgagttaagtgtcgccagaaagcgacacggcaaaccacccattgtcgtgatttacagacacaaaaaagctcccggagttgggagcttatgatagtggttggtgcttaatgccgcatccgggctgcaaaaccaatgggctgacgacttaccccaactgcttacgcgcattgcggaaaatgcgcatccatgggccatcctcgccccagttttccggatgccaggagttgctgacagtacggaaaacacgttccgggtgcggcatcataatggtgactcgaccactttcagtcgtgactgccgtaataccgttcggactaccgttcgggttagccgggtaggtttcagtgactttgccgaagttatcgacatagcgcagtgccaccagccctttgctttccagtgccgccagatgcgccgcatcacgcacttccacgcgcccttcaccatgagagacagcaatcggcatttggctgcccaccatcccctgcaacagcagagacgggctttgggttacttcaaccaggctgaaacgcgcttcaaagcgatcggaggtattgcgcacaaaacgtggccacaactcactacctgggatcagttcacgcagattagacatcatctggcaaccgttacatacccccagcgccagcgtttgcggacggtggaagaaggttgcaaactcatcgcgtacacggtcattgaacaggatactcttcgcccaaccttcaccggcacccagcacatcaccgtaggagaaaccaccgcacgcgaccagggcgtggaaatcttccaggcccgtgcgtccggtcagcaggtcactcatatgcacgtcgatagcatcaaagcctgcacggtggaaagctgccgccatttcaacatggctgttcacgccctgctcacgcagtacggcaactttcggacgtgcgccagtggcaatatacggtgctgccacatcttcgttgatatcgaagctcagttttacattcaggcccggatcggcgtcgttagatttcgcctgatgctcctgatcggcacactccgggttgtcacgcaggcgctgcatctgccaggtagtttctgcccaccagacacgcaacgtggtgcggctttcgctgaatacagtctgcccgttggcggtaatcacaaaacggtcaccggaaaccgcctgccctacataatggacacaatcagcaagcccatgctgtgccagtacggactcgaccgcttcacggtcagcggcacgaacctgaatcaccgcacccagttcttcgttaaacaacgccgccaggcgatcgtcacccagagtggcgatatccgcgtcaatgccacaatgaccagcaaaggccatttccgccagcgttaccagcaggccgccatcagagcggtcgtgatacgccagcagcttacgctgtgcaaccagcgcctgaatcgcgtcatagaagcctttcagttgcgcgacatcgcgtacatctgccggtttgtcgccaagctgacgataaacctgcgccagcgccgttgcgcccagcgcgttattgcctttgcccaaatcaatcagcagcagtgcgttatcttcggtagaaagctgcggcgtgatggtgtgacgtacatcttccacgcgggcaaatgcagaaatcaccaggctcagcgggctcgtcatttcgcgctcttcgttaccttcctgccagcgggttttcatgctcatggagtctttacccaccgggatcgtcaggcccagcgccggacaaagctcttcgcccacggctttaacggcttcatacaggcccgcatcttcaccagggtggcctgccgccgccatccagttggcggaaagtttgatgcgtttgatatcgccaatttgtgttgcggcgatgttggttaacgcttcaccgaccgccagacgggcagaggcggcgaaatccagcagcgcaaccggcgcacgctcgccaatcgccatcgcttcaccgtagtagctgtcgaggctggcggtagtgaccgcgcagttagcgaccggcacctgccacggccccaccatctgatcgcgcgctaccatgccggttacgctgcggtcgccaatggtcaccaggaaggttttttccgccacagtcggcagatgcagcacacgtttcaccgcgtctgcaatggtgatcccttcacgggccagcgcgtcgcctttcgctttcagcgtttgtacatcgcgggtcatcttcggcgttttaccaagcaggacgtccagcggcagatcgatcggctgattatcaaaatgacgatcgtgcagagaaagatgcagttcttcggtcgcttcaccaatcaccgcgtagggtgcgcgctcacgcttacacagttcgtcaaacagcggtaattgatcggcagcaaccgccagcacgtagcgttcctgggattcgttacaccagatttccagcgggctcatgcccggttcgtcgcttagaatctcgcgcagttcaaatttaccgccgcgcccgccgtcgctcaccagttccggcatggcgttagaaagaccgccagcgccaacgtcgtggataaacaggattgggttggcatcaccaagctgccagcaacggtcgatcacttcctggcagcgacgctccatctccgggttgtcgcgctgtacggaagcaaagtcgaggtcggcatcagactgaccagacgccatagaagacgctgcaccaccgccaagaccgatgttcattgccgggccgccgagaacgaccagcttcgcaccgacgttgatctcgcctttttgtacgtgatcggcgcgaatgttgccgatcccgcccgccagcatgatcggtttgtgataaccgcgcagctcttcgccgttgtggctgttcactttttcttcataagtacggaagtagccgttcagtgccggacgaccaaattcgttgttaaacgccgcgccgcccagcgggccttcggtcatgatgtccagcgcggtgacaatgcgctcaggcttaccgaaatcttcttcccacggctgttcgaagccaggaattcgcaggttggaaacggagaaaccaaccagacccgctttcggctttgcgccgcgcccggtggcaccttcatcgcggatttcaccgccggaaccggtcgccgcgcccggccacggagaaatcgccgtcgggtggttgtgagtttcgactttcatcagaatatgcgccggttcctgatggaaatcgtagcggcccgtttcgtggtcagcaaagtagcggcccacttcagaaccttccattacggcggcgttatctttataagcagagagaacgtgatctggcgtggtttcgaaagtatttttgatcatcttgaacaggcttttcggctgctgttcaccatcgataacccagtcggcgttaaaaattttgtggcggcagtgctcggagttcgcctgggcaaacatatacagttcgatgtcgttcgggttacgaccaagctttgtgaaagcatcctgcagatagtcaatttcatcttccgccagagccaagccaagacgcaggttagcgtcgatcagcgcctgacggccctgccccagcaaatcaacgctggtaaccggagtcggttgatggtgggcaaacaactgctctgcatcatctaaagcaaaaaagaccgtttccatcatgcggtcgtgcagttcagcggtaacctgctgccattgttcattggtcagcgtaccggcttctatatagtaagcaacgccgcgctcaaggcggtttacctgttgtagcccgcagttatgggcaatatcggtcgctttgctagaccagggagagatggtgccaggacgcggggtcaccagcaggagtttgccttgcggggcgtggctggcgagtgccgggccatatttcagcaggcgttcaagttgtgcgtgctcatcatcgtttaacggcgcattgaggtcagcaaaatggacatactcggcgtaaatattgtgaaccgggagcctggcagcctgaaaacgtgccagcagtttgttgattcggaatgcgctcagtgcagggctaccacgcagaatttccatcataagtctctcgtcttctaagctttcggtgtacccaagggggggaaacgggcgtcattataaagaatctgatgcgctgacgaaaccgtttgcgtggaaataaaatcaccatcgtgaattagcaacgcgtgccgccaatggctgtaataagttgccatctggcgcaggtttacgcaaaatgccgctcatttatgagtaaacctttcactattattacgttttttcaagctgggacgcgcacgacacagagaattaactaattgaaaaaattaaagattaattatctgttcatcggcattctggcactgctgctcgcggtcgctctctggccatccattccctggtttggtaaagccgacaaccgtatcgccgccattcaagcgcggggagagttgcgtgtgagcaccattcatactcccctgacttataacgaaatcaacgggaaaccttttggcctggattacgaactggcgaaacagtttgccgattacctcggcgtaaaactgaaagtgaccgtgcggcagaatatcagccagctgtttgacgaccttgataatggtaacgccgacctgctggcggcaggacttgtctataacagtgagcgggtaaaaaattatcagcctggccctacctattattccgtgagtcaacaactggtttataaagtgggtcagtatcgcccacgtacgctgggcaacctgacggcggagcaactcaccgttgcaccgggtcatgtggtggttaacgatctccagaccctgaaagaaacaaaattcccggaattaagctggaaggtagacgacaaaaaaggctctgcggaattaatggaagatgtcatcgaaggaaaactcgattacaccattgctgattctgtcgccatcagcctgtttcagcgcgttcacccggagctcgccgtagcgctcgatatcaccgatgaacaaccggtgacttggtttagcccgttagatggcgataataccctttccgccgccctgctcgacttcttcaacgaaatgaatgaagacggtacgctggcacgcattgaagagaaatacctggggcatggcgatgattttgattacgtcgatacgcgcacatttttacgcgccgtcgatgcggtactgccgcagttaaagcccctgtttgagaaatacgccgaagaaattgactggcgtttgctggccgctattgcttatcaggaaagccactgggatgcacaggccactagtccgacgggtgtgcgcggcatgatgatgttaaccaaaaataccgcgcaaagcctcggcattacggatcgtaccgatgccgaacagagcatcagcggtggcgtgcgttatttgcaggatatgatgagtaaagtgccggaaagtgtgccggagaacgagcggatctggtttgccctcgctgcgtacaatatgggctatgcgcatatgctggatgcccgcgccctgacggcaaaaaccaaagggaatcctgacagttgggctgacgcaaaacagcgtctgcctttacttagccagaaaccctattacagcaagctgacttacggctacgctcgtggacatgaagcctacgcttatgtcgaaaatattcgtaagtatcagattagcctggtgggttatctgcaagagaaagagaagcaggctacagaagcggcgatgcaactggcgcaggattatccggcggtaagccctacggagttgggcaaagagaaatttccttttctcagctttctttcccagagcagtagtaactatttgacccattctccctctctgctgttttccaggaaagggagtgaagagaaacaaaattaatccgtgctggattgcgcttttttctgcgctttaatttcctggcggcgcatgcgaaagaagtcactgagcaacgccgcgcactcatccgccagtattccttccgtaatttccactcggtgattcatacccggatgatgcagcacatccattaaagatcccgcagcgccagttttcgcgtcacgcgcaccaaagaccacgcgaccaatgcgactgtggatcatcgctccggcacacattacacatggttcaagcgtgacatacaacgtggcgtcgatcagacgataattttgcatcaccagaccaccctgccgcagggccatgatttctgcatgtgcggtgggatcatggcgaccaatcgggcggttccagccttcgccgattacccgattgttatgcactaataccgcgccgaccggcacttcccgctcatcccaggcacgtttcgccagcgtcagcgcgtgacgcatccagtattcgtggctaaattcgacttcagacaaaaagaaaactccggttataaaagcgcggcgcattatacacggacgctatgctttactttattccagttgctggagttcaccgcgcggggttactcgccaacgatgctgacagaaataaagcagcggattgtcctgattactgtcgctatagccactgtacagccgcagcggagtgccgattttgcgctccagttgtgcgaccttttcatgtcccagacaacgcatcgtcaatacccaaccaccatagccacgctgaatttggctggcgataagattaacccgcggcagccagggcgtatcgaaataaaccgcttcaaccagcggctgcggagagccggtaatcaaccagatatcagcatcggaacttaacaggtaggtggttaatcgctcctgaaccagcggaaaggcggtaacattgtcgcgaaaccagcgcacgaaatcggcctgcaacgtctgtaaacgtgcttcgctgtgaccaaaagtgcacccccacagaagcagactcatcggccagcgtgccgcacgaccttttatcaataacgcaatggctataatcggtaacaacggcaggacaagtaacgcattcagcggttggcgacgtagtaaatagcgcagaaaactgccgaacatatcctgctgatgcaatgttccatctaagtcaaaaaacaccacacgacgctcgtgagttgccaaaccatattcctctggactgaaacatcctgattaattttcgctactacatagcctaacagatagatcatcacttttccggcaacaatcgaccgcatcatggctaactggaatttttaattcatggcaattagcggcaatggaatataaaattcactcgcgtgtgtctcatattgcctgttgtcgccactatttcatcgcgaggaaagatatgaacggcttacttcgtatccgtcagcgttaccaggggcttgcccagagtgataaaaaactggcggattatctgctgctacaacctgatacggcgcgccatttaagctctcagcaactggccaacgaagccggagtcagtcagtccagcgtcgtgaagttcgcgcaaaaactcggctataaaggttttccggcgcttaagttggcgttgagtgaagcgctggcaagccagccggaaagtccctccgtgcccattcataaccaaatccgcggtgatgatccgttacggctggtcggcgaaaaactaattaaagaaaatactgccgctatgtacgcaacgctaaacgttaatagtgaagagaaactgcatgaatgcgtaacaatgttgcgctctgcgcggcggataattctgaccggtattggcgctagcggtctggtggcgcaaaactttgcctggaagctgatgaagattggcttcaatgctgccgcagtgcgcgatatgcatgcgctactcgcaacagtacaggcgagctcccctgacgatctgttattagccatttcctacaccggtgtacgacgcgagttaaacctggcggcagatgagatgctgcgagtgggcggaaaagtgctggcgattaccggctttactccgaatgccctgcaacagcgtgcttctcattgcctgtataccattgccgaagaacaagcgacaaacagtgctagtatctctgcttgtcacgctcagggaatgttaacggatttgctgttcattgcgctgattcagcaggatctggaactggcaccagaacgtattcgtcatagtgaagcgctggtgaaaaaactggtctaagtaaagaatgcgcgtataatgcccgcccggtttgtgttgttttgagagtttccttatggcgttgttaatcactaaaaaatgcatcaattgtgatatgtgtgaacccgaatgcccgaatgaggcgattagtatgggagatcatatctacgagattaacagcgataagtgtaccgaatgcgtagggcactacgagacaccaacctgccagaaggtgtgcccgatccccaatactattgtgaaagatccggcgcatgtcgagacagaagaacagttgtgggataaatttgtgctgatgcaccacgcggataaaatttaatattctactctggaagtagagtattaattatattactgggaagccttaacgccattatatttatttaattgatgacattagcataatcattcactaagttaatttatatagtatctgcccagacacttatttatagttattaaaggtgcgtccgactggttcaccggacgcaccttaagtacgtttccttgtgttataagaacagaaggatcagctgtaaaacagcaatgatgattttgatgacccgtttaatcaggtatcggcaatcagtcattcgtttttccttaaacaaggaatgcagccattcagattagcccttacatctccccaaaactgaacgtgcgagttattgagggtgcatgctgcactccacaccagagctttgacgacaccactcgtttcaatgggggaattctgtggcatggtgtaaagcacagcaaaatcttcaataacgaagccaattttaatgtacttacgaattggcggtcacgttaatctttccatcaatattgctttcttcgtaaaggctcgagtttttatgctaaagattgcaagttgcttgtaaaagataagtacactgatccataatcgctgttgttgagggtgcatgctgcacaaaattaaagttaaaaagtaaaacccccgttccttaccagttcgggggttttactttttaaagagaacggtattatttttaactttcaataattaccgtggcacaagcatagtgccgctcatctgccagcgttacatgcatatttgcaacgcccagcttttccgccagttttaatgcctcgccccatagccgtagccgtggtttgccgagctcatcattgaatacttcaaattgattaaacgccagaccattgcggatcccggtgccaaacgcttttgctgcggcttctttcacagcaaaacgcttcgccagaaaacgcaccggctggtggtgcgttttccagatagcccattcgttatcgcttaatacgcggcgtgccaggcgatcaccggatcgggcgatcaccgcttcgatgcgagcgatctccacaatatccgtgcctaaacctaatattgccattagccacgcgcttccagcatcagacgcttcatttctgccaccgcatctttcagtccggtcatcactgcacgaccaataatggcatgaccgatattcagttcatgcatctcagggatggcggcaatggctttcacgttgtgataggtcagaccgtgtccggcgttaactttcagaccgaggcttgcggcaaaggtcgcggctttggcgatacgcgccagctcttgcgcctgttcggcgtcagttttggcatcagcatagcaaccggtgtggatctcgataaacggtgcgccaacctctgccgcagctttgatctgctcttcatcggcgtcaataaacagagaaacctgaatcccggcatctgccagacgtttgcaggcatcgcgcattttgtcacgctgccctgcgacatccaggccgccttcggttgttacttcctgacgcttttccggtaccaggcagcaaaaatgtggcttcgtctcaacggcgatcgccagcatctcttcggtcaccgccatctccagattcatgcgggtatccagcgtctgacgcaggatgcgcacgtcgcggtcagtaatgtgacggcgatcttcacgtaaatgcacggtaatgccgtccgctcccgcctgctcggcaataaacgcggcctgcaccggatccgggtaagcggtaccgcgcgcgttgcgcagcgtagcgatatggtcaatgttgacgcctaacagtaattcagccatgacaatcctcatcattcataatgtgttttcaccgttcgcttaggcataaactgccggaacagttccctgctctttaaaggtttaccgccaagatacggcttaagcgccatgcgggtaaagcgtttcgcggcgcgcagtgtgtctgcgtcaggaaattcccgtgcgtttaacgcttttaactgccttccggtgaacgttttattgtcgataacgacgcttgcgataaaccctttttcttcgcgataacgatacgtcatggtgtcatctaccggctcgccgctacccgcacaatgggtaaaattgacgccataacccagatgcccgagcagtgccagttcaaagcggcgcagcgcgggttctggcgtaccagtgacccctgcaagagactgaatgcagtgcaagtaatcgaaaaaaagttcagagaagcgcgtctcgtattccagtacgcgggagagaagttcgttgatgtacagaccgctgtaaagcgtgataccgcttaatggcagcgccaggctgacggcttcagcactgcgcagcgttttgacttcgccacgcccgccaaaacgtagcaagagaggggtgaaaggctgtaatgcacctttcagggtagagcgtttagagcgtgcgcctttggcaaccagacgcacgcgcccgctttcctccgtgaagacgtccagcatcaggctggtttcgctccacgggcgactatgcaggacaaatgcgcgctgccagccttccatcggagttactcttaaagatcgtcaacgtaaccgagactgcgcagtgcgcgttcgtcgtcggcccaaccggatttcacttttacccacagttcaaggtgaacaggcgcttcgaacatttcctgcatgtctttacgcgcttcaatcccgatggttttgatcttggcccctttgttgccaatgaccatcttcttctgcccttcacgctcaacgagaatcaaaccgttgatgtcataaccaccgcgttcgttagagacgaaacgttcgatctccacggtcacggagtacggcagttcagcgccgaggaaacgcatcagtttttcgcggatgatttcagacgccataaaacgctgactgcgatcggtgatgtaatcttccgggaagtgatgagtcgcttcaggtagatgcttacgcacgattgccgcaatagtgtcaacattcagcccggtttcggcagagattggcacgatatcgaggaagttcatctggcttgccaggaactgcaggtgcggcagcagatcggctttctcctgcacgttgtccactttgttcaccgcgaggattaccggcgctttgccttcgcgcagtttgttgagcaccatttcgtcgtccggcgtccagcgggtgccttcaacgacaaaaatcaccagctcaacatcgccaatagagctgctcgccgctttgttcatcaggcggttaatggcgcgtttttcttccatatgcaggcccggtgtatcgacgtagatcgcctgatacgcgccttcagtatggatccccacaatgcggtgacgagttgtctgcgccttgcgggaagtgatggagattttctgccccagcagtttgttcaacaatgtggatttgccaacgttcggacgtccgacgatggcaataaatccgcagtaacttttatcgatgctcattccagctccagttttttcaacgcctgttcggcggcagcctgctcagccttacgacggctactacctgtgccaaccaccggttcactcaggccgctgacctggcagtggatagtaaattcctgatcgtgcgcttcgccacgtacctggactaccagataagtcggcagcggcagatggcgaccctgcaaatattcttgcaagcgcgttttcggatctttttgtttatcgcctgggctaatttcgtccaaacgagtttgataccagttgaggattaatttctcgacggtttgaatatcactgtcgaggaatacgccaccaattaatgcttcgacggtgtcggcgagaatactctcacgacgaaatccaccgcttttaagttcacctggccctaaacgtaagcactcgcctaactcaaattcgcgcgccagttccgccagcgtattgccacggaccagcgtggcgcgcatccggctcatatcgccttcatccacacgagggaaacggtgataaagcgcattggcgataacgtagctcagaatagagtcgcctaaaaattctaaacgctcgttatgtttactgctggcactacgatgagttaatgcctgctgcaacagttcctgatgattaaaagtgtagcccagcttccgttgaagccgattaattacgatggggttcatgcgataccaataaataaatgcgtcaacaattcagcacacgaaacagacctgatatacatggttctgctaactgcttcgctgcagtttcagtttaccggtatatggggaccaacgctgtttcgtgtgccgtggcaacctggaggtgccaaccttaaacttcgggggaatattctatacacaacgacgggggatgtcgttagccacgggagatttatctcataaataattcacgttgtcgccataacggcgacaacgtgaacgaagatggctattaatggatgccgccaatgcgacttaagcgcagaccagtcggccattcgccttcttgcttatcgaagctcatccagatagccgttgcccgaccgaccagattcgcttccggcacaaagccccagtaacggctgtccgcgctgttgtcgcggttgtcgcccatcatgaagtattgtcccggaggaacaatccaggttgccagttgttgccctggctgctggtaatacatccccacctgatcctgcgcaatcggcactgtcagaatgcggtgcgtcacatcacccagtgtctctttacgctcggaaagacgaattccattttctttggtttcgtttttcggcacttcaaagaatccgctggtcgcttccccaccattacggcgactgaaggtctgaacgaaatcgctcggttccacgttactgtaggtgaccggcagcgcgttttcacacgcctggccggaactgcatcccggttgaatcgtcagctctttactgaccggatcgtaagtgactttatcgcccggtaaacccaccgcgcgcttgatgtaatcaagctttggatcttccggatatttaaagaccacgatatcgccgcgtttcggatgaccggtttcgatcagcgttttctggtagataggatctttaatgccataagcaaacttctctaccagaataaaatcaccaattaacagagtcggcatcatgctaccactcgggatctggaacggttcataaataaagctacgcacaatcaatacgatagccagtaccggaaaaacagaagcaccggtttccagccagccaggcttcggcgcaacctttttcaacgttgctttatccagactgtccccggcagccgcctgcgccgctgcctgacgttcccgccgtttaggtgcgaaaaagaatttatccacgcaccataaaatgcccgtcaccagtgtggcaatcaccagaatcagggcaaacatattcgccatgccaactcctaagggttatttgttgtctttgccgacgtgcagaatggcgaggaacgcttcctgcggcagctcgacgttaccgatctgcttcatgcgtttcttaccttctttctgcttctgcagcagctttttcttacggctgatatcgccgccataacatttagccagtacgtttttacgcagctgtttcacggtggatcgcgcaatgatgtgcgtaccaatcgctgcctgaatggcgatatcaaactgctggcgtgggatcagatctttcatcttctccaccaactcgcgaccgcggttttggctattatcacggtgggtgatcaacgccagcgcatcaacacgttcaccgttgattaatacgtctacacgtaccatgtcggacgcctggaagcgcttgaagttgtaatccagagacgcataaccacggctggtagatttcaggcgatcgaagaagtcgagcaccacttccgccatcgggatctcgtacgtcagcgccacctgattaccgtggtaaaccatattggtctgcacgccgcgtttttctacgcacaacgtaataacgttgccgagatatgcctgcggcagcagcatgtgacactctgcaatcggctcgcgcagttcgtagatgttatttaccgcaggcagcttggatgggctgtcgacgtagataacttctctactcgtggtttcaacttcatacactacggtcggcgcagtggtgatcagatccagatcgtattcacgttccagacgttcctggatgatctccatgtgcagcaggccgaggaagccgcagcggaaaccaaagcccagcgcgctggagctttccggctcatagaacagactggcatcgttcaggctgagtttacccagcgcgtcacggaaggcttcatagtcgtcggaacttaccgggaacagaccggcgtatacctgcggtttgactttcttaaagccaggcagcgccttttctgccggattacgcgccagcgttaaggtatcgccgactggagcgccgtggatatctttaatcgcacatacgagccagcctacttcgccacatttcagttcagtgcggtcaacctgtttcggcgtgaagatgcccagacggtcggcgttataggtctgcccggtactcatgactttcactttgtcgcccttacgcagggtgccgtttttaatacggataagactaacaacgcccaggtagttgtcgaaccaactgtcgataattagtgcctgcaacgggccttccggatcgccttccggcggcggaatgtcgcgcaccagacgttcgagaacgtcctgcacaccaacgccggttttcgcactacagcgcaccgcgtcggtggcgtcgatgccgacgatatcttcaatttcttccgccacgcgttcaggatcggctgccggcaggtcaatcttgttcagtaccggcacaacttcgagatccatttccatggcggtgtagcagtttgccagggtttgcgcttctacgccctgcccggcgtcgaccaccagcaatgcaccttcacaggcagccaggctacgggaaacttcataggagaagtctacgtggcccggggtgtcgataaagttaagctgataggtttcgccgtcagacgctttgtagtccagcgtcacgctttgcgctttgatggtaatgccacgctcacgctcaagatccatggaatcgagaacctgcgcctccatttcacggtcagacaggccaccgcagatctggataatacggtcagacagcgtgcttttaccgtggtcaatgtgagctatgatgctaaagttacgtatattcttcataaagtatgattattgtgccttaatgcccggttaaccaggcttttagaagtcgctgttctgagcttaacgtctgtattaatagaaacgccgcattctacactacaacattgaggcgaggaaatgttcataccgtatggattgtggtatctggaaacgtcctcgcatttgttatgcaaaatgcaacaaagccagtgaaatcactggctcgcgtcttcgctagatgtttcaaatcgcacaaggccaggcggcaatgccacgcttaagatgatcggttgccattctgcccgggcagcaaacttacggctgtagccgcgcgcaatcaggaacccgccaataccaccgaggatcgcaccacataatgctgcgacgtcagaagcaaagagtagctgaaataggctagcgataaggaataatcccaccagcgggctcatataaaccagtaatgcggagctaagcaggctgccttcggcgatccccaattccactttttgccccggcactaacggctcatcacagggtacgacaatggtatgcgtggtttgcgggccaagtttatttaacacgcggctaccgcaaccggcgcgactagcgcagctgctgcaactagctttaacatcacaactgaccagcgcctgcccgttttgccaggagacgacggtagcccactctttgatcattgcgctgccccgaacttaatattctcggcaatgcgtttcgccgtttgcggcggcagttcaccgacaatggtgatttcggcgttatcacgtacgcttgtactgacggttctgcgtccggtgcgcaacatctgatcggtgctgcttggcgtagcgcggttaacgtttacgctgaagctgaataatccgtcggaatagagacgactttcgataggcatgttgtccatcgtcggtagcggacgtcgactactggaaacttcgctaaaaccctgtggcaaccaggttggcgtccagctgaatttagctttttcacctacaggaacagaaagcaacggcggcaaatttgccttcgccagcgtctgcatactgctgctgatatcctgattgacgttaaaagcaatcacgcgaaattgttccagcgtttcaccatcgcgatcaaggagatcaacccgcatcggtaatttgctttcggtgtccatccacacgatgtagctgtagcgtgtaccatctcgggcaaccacgcgaatgacttcgcaaagacgatcagcaatacgcgtgcgcccgacggagataaagtcgtagtaaggagaaaggcgtttgaaatcggtatagataaggcttggcagagaatcaacaatgtaatcgccattaagcgtgaacggttcaagtcccggttcaaaatagctgatttcattgccgcgctgtaccacttcccggcgcgggccatccatttgcaacaattgtgcaagaggacggttatcgaggcgtgcatgtcgataacgcagagactcaacaccctgtttattgatgctgatgaaactcagctcgtaattcagactctgactggccaggttcatctgctgtaataacgccccggacgcgggagtggcgctggcgttagcagagaataacaggctacctgtcactaaactcatggcaaaccaaagttgcttcattactggctttgcgttcctaaagtttgaattcctggcacctgtacagcggcttgctgggtttgcgcctgctcaaactgaagctgttcagagtggagtcggcgttgcagttcgtaatcctgcaacattgcattaatgcgacgacgctgctcctgtacctgctgctgttgaccattgtttgcggtcgcttcagaaggtactcccaggcttaccgggctggctttacccatcatcggcagtgtattaaataccggcgtttcgggctgctgggacgtttcagattgtccattatagtgctggacgccaacgataactgcaaggcttacgcatgcggctacgcccatttgggtaagctgtgccgcccacggacgtactttctgccagaatggcattttctgccattgatgcggcgcaggctgggcttccgggatcaatgtcgccggttgacgtactggctcttcttcaatggcggccatcacgcgactagagatatcgaaatggagcacctcgggagtatcaccccgcatactgtcacggattaagtgatagctttcccaggttttctgcatttctgggttatgagccagttcgttaagcagctcactatccagcgtttcgccatccattaaagcggaaagttgttctttctgcatgcctaatacccttatccagtatcccgctatcgtcaacgcctgataagcggttgaactttgttatcaatagcttccctcgctcggaagatacgactacgcaccgtacctaccggacaatccatgatagcggctatctcttcatagctcaggccatccagctcccgcaaggttattgccatgcgtaaatcttccgggagggactcaatagttcggaaaactatctgtctcagttcttcactcaacattaagttctcagggttgctaatttctttcaacgcgccgccactttcgaagttttcagcttcaatggcatccacatcactggaaggtggacgacgcccctgagcaaccaggtaatttttcgctgtatttacagcaatccgatacagccatgtataaaaagcgctatctccccggaagctatccagcgcacgataggctttaataaaagcttcttgtaccacatcgggaacatcaccgctcggcacatagcgggaaaccagactcgccactttatgctgatagcgcactaccagtaagttaaaggctttctgatctcccttctggacccgttcaaccaggacctggtccgttaactgctcgctcatccgaggtaaagtctccccaaaccaaatttccacgcgctatcgaaacgccactccattagctgcaatttgagcaagcaaagggttagagtgtctcgtttttgtaaagttccgtaacgcatctgtttttgtttgtcatgctgtagacggatcattatctatcattataagtctacagaatctgaacatcgcattatctgtgtagaaatgcccatttaactgcctgaagagtaacccaacggcctttttatttcaccacctaatcctccaccagccagtaacttctctttttctcgccgccctgcgtcagcgtgtttagcaactgtaacaaatattaaaatagcaggtgtttatccgcacaacatgatgctatgctgaccaaaccatgtttagtaaattaaacaaagaaaatgaatactctccctgaacatagttgtgacgtgttgattatcggtagcggcgcagccggacttagtctggcgctacgcctggctgaccagcatcaggtcatcgttctaagtaaaggcccggtaacggaaggtagtacattttatgcccagggcggtattgccgccgtgtttgatgaaactgacagcattgacagccatgtggaagacacattgattgccggggctggtatttgcgatcgccatgcagttgaatttgtcgccagcaatgcacgatcctgtgtgcaatggctaatcgaccagggggtgttgtttgatacccacattcaaccgaatggcgaagaaagttaccatctgacccgtgaaggtggacatagtcaccgtcgtattcttcatgccgccgacgccaccggtagagaagtagaaaccacgctggtgagcaaggcgctgaaccatccgaatattcgcgtgctggagcgcagcaacgcggttgatctgattgtttctgacaaaattggcctgccgggcacgcgacgggttgttggcgcgtgggtatggaaccgtaataaagaaacggtggaaacctgccacgcaaaagcggtggtgctggcaaccggcggtgcgagcaaggtttatcagtacaccaccaatccggatatttcttctggcgatggcattgctatggcgtggcgcgcaggctgccgggttgccaatctcgaatttaatcagttccaccctaccgcgctatatcacccacaggcacgcaatttcctgttaacagaagcactgcgcggcgaaggcgcttatctcaagcgcccggatggtacgcgttttatgcccgattttgatgagcgcggcgaactggccccgcgcgatattgtcgcccgcgccattgaccatgaaatgaaacgcctcggcgcagattgtatgttccttgatatcagccataagcccgccgattttattcgccagcatttcccgatgatttatgaaaagctgctcgggctggggattgatctcacacaagaaccggtaccgattgtgcctgctgcacattatacctgcggtggtgtaatggttgatgatcatgggcgtacggacgtcgagggcttgtatgccattggcgaggtgagttataccggcttacacggcgctaaccgcatggccagcaatagtttgctggagtgtctggtctatggctggagcgcggcggaagatatcaccagacgtatgccttatgcccacgacatcagtacgttaccgccgtgggatgaaagccgcgttgagaaccctgacgaacgggtagtaattcagcataactggcacgagctacgtctgtttatgtgggattacgttggcattgtgcgcacaacgaagcgcctggaacgcgccctgcggcggataaccatgctccaacaagaaatagacgaatattacgcccatttccgcgtcagtaataatttgctggagctgcgtaatctggtacaggttgccgagttgattgttcgctgtgcaatgatgcgtaaagagagtcgggggttgcatttcacgctggattatccggaactgctcacccattccggtccgagcatcctttcccccggcaatcattacataaacagataaaaagcctgggtcagcgccgtatacgcttcggaatagttctggtctggcccacgaatgactaagcgatcgctaaagcattctcccgcctgcggggagaatgccagcagcacccgatgcggcagtcgcgcttcgttttccgccacatccgtccgcaaacgtaaatgccagcccatgcttaatgccagctccgtaaaaccattaccaatctgctctggcagcactacgcagaaaaatccctcttcggtaatgcactccgccgcacaggtcagcaagcttgggtgatcaagcgtagtggtatagcgagcctgttcccgttgaggtgtgctgcactctactccctgctgatagtaaggtgggttactgatgattaaatcgaagcgtactgtctgctgtgtaatccactgctgaatatccgccgtatggacgttaatccgctctgcccacggggactggttgatattttcctgcgcctgcgcggcagcttcactttccagttcaactgcatcaatcatcacgctgtcatcggttcgctgcgccagcattaatgccagcaacccgctacccgcgccgatatcaaggcaacgttttaccccagccaccggtgcccatgcgcccaataaaataccatccgttcccactttcatcgcacagcgatcgtgagcaacaaaaaactgtttaaaagtaaatccattacgacgaagcacggatgtagactgactcatgaaaataaaaccttgcaggaaaaacggcgatagcaccgggtgagaacaatacccgagaagcgatatccatacaaacagatgaagattgcagccgtaacgtctataatcagcgccccacacagaggtagaacatgactgtaacgactttttccgaacttgaactcgacgaaagcctgctggaagccctccaggataaaggtttcactcgcccgaccgccattcaggctgccgccattccgcctgcgctcgatggccgtgatgtactcggttctgcgccgacaggcaccggtaaaacggcggcgtatctgctgccagcgttgcagcacctgctcgatttcccgcgtaagaaatccggtccgccgcgtattttgatcctcaccccaactcgcgagctggcgatgcaggtgtccgatcatgcccgcgaactggcgaaacatacgcatctggatatcgccaccatcaccggcggcgtagcctatatgaaccacgcggaagtgttcagcgaaaatcaggacatcgtggtcgccacgaccggacgtctgctgcaatacataaaagaagagaacttcgattgccgcgcggttgaaacgctgatcctcgacgaagcagaccgtatgctggatatgggcttcgctcaggatatcgaacatattgctggcgaaacgcgctggcgtaaacagaccctgctctttagcgcaacgctggaaggcgatgcgattcaggactttgccgagcgtctgctggaagatccggtggaagtttctgccaatccctccacccgtgagcgcaaaaaaattcatcagtggtattaccgcgccgatgatcttgagcataaaaccgcgttgctggtgcatctgttaaaacagccggaagcgacccgcagtattgtgtttgtgcgtaagcgtgagcgtgtgcatgagctggcaaactggctgcgcgaagcgggcatcaacaactgctatctcgaaggtgagatggtacagggcaagcgtaacgaagcgatcaagcgtttgaccgaaggtcgcgtaaacgtactggtcgcaaccgatgttgccgcgcgcggtatcgacattcctgacgtcagccacgtctttaacttcgatatgccgcgcagtggcgatacttatttgcaccgtatcggacgtaccgcgcgcgccggtcgtaaaggcaccgcaattagcctggtggaagcccatgaccatctgctgctgggtaaagtaggccgctatattgaagagccaattaaagctcgcgttattgatgagttacgcccgaaaacgcgtgcgccaagcgaaaagcagaccggcaagccaagcaagaaagtactggctaaacgtgctgagaagaaaaaagctaaagagaaagagaagccgcgggtgaaaaaacgccatcgcgacaccaaaaatattggtaagcgccgtaaaccaagcggaacgggcgtgccaccgcaaacgacagaagagtaatctcaatgccaggtttaagcctggtattaaaagtgctggcaaacgcaaaactgcctgatgcgctacgcttatcaggcctacgtggctcatgcaatatattgaatttgcacgatcttgtaggccggataaggcgttcacgccgcatccggcatgaataaagcgcactttgtcgacaagttaaatgccgggtttaatcccgacattatttttatccagccacaaaactctcttcaacacactgaataaaagtgtgcatcgccgggctaaccgcttttccagcatgatgtgcgcacatggccgtaatggtctggctctgttcgccaaaaggcaattcaattaattctccgcactccaactcttttgccaccgcaaagcgcggtaggtagctgaccccgatattcgccgcgacacaacgcttgatgctttcgatacttataagctcaatggtgttttccaccgtgatccgccgctgacgcagcgtgctctcaaatatctgccggaagacacattgcggttcgttgataataaagctacaggcgttatgtcttcccggctcagtaaaatcgacatctgcaatttgcggactagccaccagcaccagactttgttcacccaactctcgtcgattcagagcatcatcattccctacacgataaaagacgccaacatcggcctcatcattcagtagcgcatcacggatcacgtaacagttcaggctctgcaagcttaaacgcacttttggggcgcgttgccgaaaacgctgcaacacctgcggcattcggtaagagagcaacgtttcgccgctaacaacgcgtagttccccgtccggatcactctcctttttggcagcctcacgaagcgtatccatcactcgggtaagttcataaatgtgcggcagcaacttttttccttcgcgggtaaggcacatccgtcggccaattttctcaaataactggacactaaactcctgctcaagctgctgaatatgaaaagtcaccgtgctttgtgtacagcacaatttttggctagctcgcaaaaaggaaccctcttccaccacggttttaagcgtaataaaacggcgcagatccataaccccaaacctatcgaaaatatcgaatctagaatataaaaacattcatttttttaaatgttccgtgtcgggtactgtctaccaaaacagaggagataacaagtgacaccgacccttttaagtgctttttggacttacaccctgattaccgctatgacgccaggaccgaacaatattctcgcccttagctctgctacgagccatggatttcgtcaaagtacccgcgtgctggcagggatgagtctgggatttttgattgtgatgttactgtgtgcgggcattagttttagtctggcagtgattgacccggcagcggtacaccttttgagttgggcgggggcggcatatattgtctggctggcgtggaaaatcgccaccagcccaacaaaggaagacggacttcaggcaaaaccaatcagcttttgggccagctttgctttgcagtttgtgaacgtcaaaatcattttgtacggtgttacggcactgagcacgtttgttctgccgcaaacacaggcgttaagctgggtagttggcgtcagcgttttgctggcgatgattgggacgtttggcaatgtgtgctgggcgctggcggggcatctgtttcagcgattgtttcgccagtatggtcgccagttaaatatcgtgcttgccctgttgctggtctattgcgcggtacgcattttctattaacgaaaaaaagcggaagaggtcgccctcttccgcttagtaacttgctacttaagccttacaggctttcagtaaaggtacgagcgataacgtcgcgctgctgttccggagtcagagagttaaagcgaactgcataaccggatacacggatggtcagctgcggatatttttccggatgcttaactgcatcttccagagtttcgcgacgcagaacgttaacgttcaggtgttgaccaccttcaacgcgaacttctggtttcacttctactggaacttcacggtattcaatgtcacccagtttgcttactgcaaccacttcatcttctgcataacctgcttttgcaacgatgcaacgcgcttcgcctttttcgctgtccagcagccagaaagagttcagcagatcgtcgttagcggctttagtaatctggatacctgtaatcatgtgatgcctccccggcaaaattatttgatttgttcagcctgtcgcggccaattggtaaaaccattgttgcttgagtgtatatatactcctcaaacacccttgaatctttgatttaaatcaataaaaaccacacatcaagtatggtcgcaaatggattttattgttttacatcaacttatgcgggtgtgaaattttaccaatttacatttttttgcactcgtttaagtctaaaaaatgagcatgattttgttctgtagaaagaagcagttaagctaggcggattgaagattcgcaggagagcgagatggctaacgaattaacctggcatgacgtgctggctgaagagaagcagcaaccctattttcttaatacccttcagaccgtcgccagcgagcggcagtccggcgtcactatctacccaccacaaaaagatgtctttaacgcgttccgctttacagagttgggtgacgttaaagtggtgattctcggccaggatccttatcacggaccgggacaggcgcatggtctggcattttccgttcgtcccggcattgccattcctccgagtttattgaatatgtataaagagctggaaaatactattccgggcttcacccgccctaatcatggttatcttgaaagctgggcgcgtcagggcgttctgctactcaatactgtgttgacggtacgcgcaggtcaggcgcattcccacgccagcctcggctgggaaaccttcaccgataaagtgatcagcctgattaaccagcatcgcgaaggcgtggtgtttttgttgtggggaagccatgcgcaaaagaaaggggcgattatagataagcaacgccatcatgtactgaaagcaccgcatccgagcccgcttagcgcgcatcgtggattctttggctgcaaccattttgtgctggcaaatcagtggctggaacaacgtggcgagacgccgattgactggatgccagtattaccggcagagagtgagtaaatttgcggggaaatgccggatggcagagttgccacccggctgatttatcaggctttattctgacgccaccattcaccaagcaaaacgccggttgcgacagagatattcagcccggcaacgttgcccgtaccgtcaatcttcacgcgcagatcgttcggatcgcgtgcggcatccggtaacccttcatattcctgacccagcaccagtaccattttcgctggcagactagttttgaacagcggtttaccctgctcgctggaagtggtcactacggtgtaacctgcctgacggaaatcatccagcacgttaacaatgttgtcgccagtaatcggctgaacgtgctctgcgccgccttctgcggtacggatagccgccccgctctccagcagtgccgcatcctgcaccacgacacctttcacgccgaagtgcgcgcagctgcgcatcatgccacccaggttatgcgggttagattcgttttccagtgccagaacgcaatcctgcgcgcctgcctggcttacccactgctgcacggttgtaccgttacgctttttgatcaagaagcaaacgccgccgtgatgttccgtgccactcgcttttgtcaattccgcttcatccaccacatggtacgctttgcggtttgctgccatccagcgcaaagcttctttaaaacgcggcgttacactctggataaaccaggcgcgaacaatcgcttccggacggctctggaaaagtgcctgacatgcattttcgccgtagacgcgggtttcttccgcacgctgacgacgcaacacttccggatcaataaaacttttaccactgatgccaccgtgatcggccttttccggcgtctcatcacccggcgcgcgggaaaccgtgcgccacgggctatcttcccacttgcggtcacggggctgactctgtttgtcatcgcgggcggggcgacggccaccgtcagcacgagattttcctggacgcccgccccctttcccggtacgcgggttgtgggtacgtttatcagaatcatcatcactgcggacatacatcactttgaccttgccgcttttacctttcatttcatcgttcatgcttttctccaccagcgctgcgcgaagcgcgcagattacccgaagtccgcgcggttcgccatgatttcgtaccaaagcctgcgactatcatacctattgaataaaacagattgttgtctggaacaatgtccccgataatatgtaacatattagaaacataccggcgtcgttgccgataagtctccttactcatcccgaggttagttatgaataccgtttgtacccattgtcaggccatcaatcgcattcccgacgatcggatcgaagatgcggcaaaatgcggacgctgcggtcacgacttgtttgacggagaggtgattaatgcgaccggtgaaacactcgacaaattgctgaaggatgatctacctgtggtgatcgacttctgggcaccgtggtgcggcccctgccgtaatttcgcaccaatttttgaagatgtcgcgcaagagcgtagcggtaaagtgcgctttgtgaaagtgaataccgaagctgaacgtgaattgagcagtcgctttggaattcgtagtataccgacgatcatgattttcaaaaacggtcaggttgtcgacatgcttaatggcgcagtaccgaaagcgccgttcgatagctggctgaacgaatctctttaatcttaccggggcgcatcttgtgccccgttttctcctctgcgacaatggcgttttttcgacgctctcttatgaccgaaaacgctgttctccagttacgcgccgagcgtattgcgcgcgcaacacgtccttttcttgcccgcggtaatcgcgttcgtcgctgccaacgctgtcttttgccagagaaattatgtctctgtagcacaattaccccagcacaagcaaaaagtcgcttctgtttgctgatgttcgacaccgagccaatgaagcccagtaataccgggcgtctcattgctgatattttgcctgataccgttgcgtttcaatggagccgtaccgaacccagccaggatttgctggagttggtgcaaaacccggactatcagccaatggtggtctttcccgctagctatgctgatgagcaacgggaagtgatcttcacaccacctgccggtaagccaccgctgtttatcatgctcgatggtacctggccggaagctcgcaagatgtttcgtaaaagtccgtatctggataatcttcccgtcatttccgtcgatctttcccggctttctgcctatcgcctgcgtgaagcccaggctgaaggccaatattgtactgccgaggtagccatcgcactgttagatatggccggcgataccggggcggcggcagggttaggcgagcattttacccgctttaaaacacgctatctggcaggaaaaacgcaacatctgggtagcatcacagcagaacagttagaaagcgtttaaaatcattcggtcacttctgcgggagaccggtatgagtcagcgaggactggaagcactactgcgaccaaaaagcatagcggtaattggcgcgagcatgaaacccaatcgcgcaggttacctgatgatgcgtaacctgctggcgggaggctttaacggaccggtactcccggtgacgccagcctggaaagcggtgttgggtgtgttggcctggccggatattgccagcttgccctttacacccgaccttgcggttttatgtaccaatgccagccgtaatcttgctcttctggaagagctcggcgagaaaggctgtaaaacctgcattattctttccgccccggcaagccaacacgaagatctccgcgcctgcgccctgcgccataacatgcgcctgcttggaccaaacagtctgggtttactggctccctggcaaggtctgaatgccagctttagccctgtgccgattaaacgcggcaagctggcgtttattagccaaagcgctgccgtctccaacaccatcctcgactgggcgcaacagcgtaagatgggcttttcctactttattgcgctcggcgacagcctggatatcgacgttgatgaattgcttgactatctggcacgcgacagtaaaaccagcgccatcctgctctatctcgaacagttaagcgacgcgcgacgctttgttagcgcggcccgtagtgccagccgtaataaaccgattctggtgattaaaagcggacgtagcccggcggcacagcgactgctcaacacgacggcaggaatggacccggcatgggatgcggctattcagcgtgccggtttgttgcgggtacaggacacccacgagctgtttagcgcggtggaaacccttagccatatgcgcccgctacgtggcgaccggctgatgattatcagcaacggtgctgcgcctgccgcgctggcgctggatgccttatggagtcgcaatggcaagctggcaacgctaagcgaagaaacctgccagaaactgcgcgatgcactgccagaacatgtggcaatatctaacccgctcgatctacgcgatgacgccagcagtgagcactatattaaaacgctggatattctgctccacagccaggattttgacgcgctgatggttattcatagccccagcgccgctgctcccgcaacagaaagcgcgcaagtattaattgaagcggtaaagcatcatccccgcagcaaatatgtctctttgctgacgaactggtgcggcgagcactccagccaagaggcacgacgtttattcagcgaagccgggctgccgacctaccgtaccccggaaggaaccatcactgcttttatgcatatggtggagtaccggcgtaatcagaagcaactacgcgaaacgccggcgttgcccagcaatctgacttccaataccgcagaagcgcatcttctgttgcaacaggcgattgccgaaggggctacgagcctcgatacccatgaagttcagcccatcctgcaagcgtatggcatgaacacgctccctacctggattgccagcgatagcaccgaagcggtgcatattgccgaacagattggttatccggtggcgctgaaattgcgtagcccggatattccacataaaagcgaagttcagggcgtcatgctttacctgcgtacagccaatgaagtccagcaagcggcgaacgctattttcgatcgcgtaaaaatggcctggccacaggcgcgggtccacggcctgttggtgcaaagtatggctaaccgtgctggcgctcaggagttgcgggttgtggttgagcacgatccggttttcgggccgttgatcatgctgggtgaaggcggtgtggagtggcgtcctgaagatcaagccgtcgtcgcactgccgccgctgaacatgaacctggcccgctatctggttattcaggggatcaaaagtaaaaagattcgtgcgcgcagtgcgctacgcccattggatgttgcaggcttgagccagcttctggtgcaggtttccaacttgattgtcgattgcccggaaattcagcgtctggatattcatcctttgctggcttctggcagtgaatttaccgcgctggatgtcacgctggatatcagcccgtttgaaggcgataacgagagtcggctggcagtgcgcccttatccgcatcagctggaagaatgggtagaattgaaaaacggtgaacgctgcttgttccgcccgattttgccagaagatgagccacaacttcagcaattcattagccgagtcaccaaagaagatctttattaccgctactttagcgagatcaacgaatttacccatgaagatttagccaacatgacacagatcgactacgatcgggaaatggcgtttgtagcggtacgacgtattgatcaaacggaagagatcctcggcgtcacgcgtgcgatttccgatcctgataacatcgatgccgaatttgctgtactggttcgcagcgatctcaaagggttaggcttaggtcgacgcttaatggaaaagttgattacctatacgcgagatcacggactacaacgtctgaatggtattacgatgccaaacaatcgtggcatggtggcgctagcccgcaagctcgggtttaacgttgatatccagctcgaagaggggatcgttgggcttacgctaaatcttgcccagcgcgaggaaagttgagtaaggtactggaaatgttgaccacttaatcgggactggtgttattattgcccgcttatgtcgtctgcattgcacagaggacccttcaatgaacagagaagaaatgcactgtgatgttgagtaaatttaagcgtaataaacatcaacaacaccttgcccaactacccaagatttctcaaagtgttgatgatgtcgatttcttttacgctcccgccgacttccgggagacgctgctggaaaaaatagccagcgcgaagcagcgcatttgcattgtcgccctgtatctcgaacaggatgacggtggcaaaggcattctgaacgcgttgtatgaggctaaaaggcagcgtccggaactggatgtgcgggtgctggtcgactggcatcgtgcacaacgtggacgcattggcgctgcggcatctaacactaacgctgactggtactgccgcatggcgcaggaaaatccgggcgtagatgttccggtttatggcgttccaatcaatactcgtgaagcccttggtgttctgcactttaaaggctttatcatcgacgatagcgtactttatagcggtgccagcctgaacgatgtttacctgcatcagcacgataaatatcgctacgaccgttatcatctgatccgtaaccgtaagatgagtgacattatgtttgaatgggttacacagaatattatgaatggccgcggcgttaatcgtctggatgatgttaatcggccaaaaagcccggaaatcaagaacgatattcgtctgttccgccaggagctgcgtgatgccgcttatcatttccagggcgatgccgacaacgatcagctttctgtaacgccgctagtggggctggggaaaagcagtctgttgaacaagaccattttccatcttatgccttgtgccgagcagaaactaaccatctgtacgccatacttcaacctgccagcaatccttgtgcgcaatattatccagttgctgcgcgaagggaaaaaggtcgaaattattgttggtgataaaaccgcgaatgacttctacattccggaagatgaacctttcaagataattggcgcattgccttatctctatgagatcaatctgcgtcgtttcctgagccgtttgcagtattacgtcaatactgaccagctagtggttcggttatggaaagatgacgacaacacctatcacctgaaagggatgtgggttgatgataagtggatgttgatcaccggtaataacctgaacccgcgcgcctggcgtctggatctggaaaacgccattttgatccacgatccgcaacttgagctggcgccacagcgagagaaagaactggagctgatccgcgagcataccaccatcgttaagcactatcgcgatctgcaaagtattgccgattatccggtgaaggttcgtaaactcatccgccgtttgcgccgtatccgcatcgaccgattaattagccgcatcctgtaatcacaaccccgtcctgtacggggtttgttttttggaggccacgttttgcgtattctttttgtctgttcgctattgttactttctggatgcagccatatggctaacgatagctggagcgggcaggataaagctcaacactttatcgccagcgcgatgctttccgccgccggaaatgaatatagtcagcatcaggggatgagccgggatcgcagtgccatgtttggattgatgttctctgtcagtttgggggcgagtaaagagctttgggatagccgccccgaagggagcggctggagctggaaggatttggcctgggatgtcgccggtgcaagcaccggctataccgtctggcaactgacccgtcattaaagacgcatccccttccctttgcgatgtagcatcaaagaaaccagaaacgccaccacggccatcaaggtcacataccagaagaaggctgtttccattcctatacttttcaggctcaacgctacgtactccgcgctaccaccaaatatagcattagcgaccgcataactcagaccaacgcctaatgcgcgaacctgtgccgggaacatctcagccttcagtattccactgatacttgtataaaaactcactatcagcagggcacacatcaccagaccaaaagcggcataagggctggaaacgttttgcaatgcactgagaataggaacggtaaaaatggctgccaggctaccgaaacataacatactggtacggcgaccaatcttatcgctcagcgcgccaatgagtggttgaataagcatgaatacaaacaatgcggcagtcataatgccactcgccacgttggcatgcattcccgcagtatttaccagatacttctgcatataagtagtgaaggtatagaaacaaagggagcccgcagcggtaaaaccgagaaccatgatgaatgcacggcgattgcgccataatcctttcagagatccagcttcttttaaagcgcgcgtttcttgttggctagtttcatctaactgacgacgtaaccacaacgccacaacagctaacacagctcctaacgcgaaaggaatacgccatccccactctctgagtgcagcgtcttccatggtgtgttgtaaaaccacgacaaccagtagggctagcagttgtccgccgatcaacgtcacatactgaaaacttgcgtaaaaacctttgcgcccttcaacggcaacttcactcatataggtggcgctggtgccatattctccgccaacagataatccctgaaataaacgagcgagaagcaataatgccggagcccacgtacctatagtttcataacctgggaggcaggcgataaccaggcttccgaaacacatcatacacacgcttaacagcatgctttttttgcgaccatgtttatcggctatgcggccaaatagccaaccgcctattgggcgcatcaggaatcccgcagcaaaaacacctgctgtttgtagtagttgagtcgtcgtgttcccggaagggaagaagatgtgggcaaagtagagactacagaagctgtagacatagaaatcgaaccactcgaccagattaccactagaggcccccacaatcgcccaaatgcggcgacgagtatcactacttgtcagtttgctgtctgccgttacagtactttcagccatgccattatgtctcctgccgtaatccgatgcttttgtcggtcgcttttgtttattttttttgtaaaggaaatattatacatttgttgcatatcattatgcaaccttaaccatgaatttagttagcaggaaaatggttattgaggagcttaaggataaatttctggtaaggaggacacgtatggaagtgggcaagttggggaagccgtatccgttgctgaatctggcatatgtgggagtataagacgcgcagcgtcgcatcaggcatttttttctgcgccaatgcaaaaaggccatccgtcaggatggcctttcgcataatttgatgcctggcagttccctactctcgcatggggagaccccacactaccatcggcgctacggcgtttcacttctgagttcggcatggggtcaggtgggaccaccgcgctacggccgccaggcaaattctgttttatcagaccgcttctgcgttctgatttaatctgtatcaggctgaaaatcttctctcatccgccaaaacagcttcggcgttgtaaggttaagcctcacggttcattagtaccggttagctcaacgcatcgctgcgcttacacacccggcctatcaacgtcgtcgtcttcaacgttccttcaggacccttaaagggtcagggagaactcatctcggggcaagtttcgtgcttagatgctttcagcacttatctcttccgcatttagctaccgggcagtgccattggcatgacaacccgaacaccagtgatgcgtccactccggtcctctcgtactaggagcagcccccctcagttctccagcgcccacggcagatagggaccgaactgtctcacgacgttctaaacccagctcgcgtaccactttaaatggcgaacagccatacccttgggacctacttcagccccaggatgtgatgagccgacatcgaggtgccaaacaccgccgtcgatatgaactcttgggcggtatcagcctgttatccccggagtaccttttatccgttgagcgatggcccttccattcagaaccaccggatcactatgacctgctttcgcacctgctcgcgccgtcacgctcgcagtcaagctggcttatgccattgcactaacctcctgatgtccgaccaggattagccaaccttcgtgctcctccgttactctttaggaggagaccgccccagtcaaactacccaccagacactgtccgcaacccggattacgggtcaacgttagaacatcaaacattaaagggtggtatttcaaggtcggctccatgcagactggcgtccacacttcaaagcctcccacctatcctacacatcaaggctcaatgttcagtgtcaagctatagtaaaggttcacggggtctttccgtcttgccgcgggtacactgcatcttcacagcgagttcaatttcactgagtctcgggtggagacagcctggccatcattacgccattcgtgcaggtcggaacttacccgacaaggaatttcgctaccttaggaccgttatagttacggccgccgtttaccggggcttcgatcaagagcttcgcttgcgctaaccccatcaattaaccttccggcaccgggcaggcgtcacaccgtatacgtccactttcgtgtttgcacagtgctgtgtttttaataaacagttgcagccagctggtatcttcgactgatttcagctccatccgcgagggacctcacctacatatcagcgtgccttctcccgaagttacggcaccattttgcctagttccttcacccgagttctctcaagcgccttggtattctctacctgaccacctgtgtcggtttggggtacgatttgatgttacctgatgcttagaggcttttcctggaagcagggcatttgttgcttcagcaccgtagtgcctcgtcatcacgcctcagccttgattttccggatttgcctggaaaaccagcctacacgcttaaaccgggacaaccgtcgcccggccaacatagccttctccgtccccccttcgcagtaacaccaagtacaggaatattaacctgtttcccatcgactacgcctttcggcctcgccttaggggtcgactcaccctgccccgattaacgttggacaggaacccttggtcttccggcgagcgggcttttcacccgctttatcgttacttatgtcagcattcgcacttctgatacctccagcatgcctcacagcacaccttcgcaggcttacagaacgctcccctacccaacaacgcataagcgtcgctgccgcagcttcggtgcatggtttagccccgttacatcttccgcgcaggccgactcgaccagtgagctattacgctttctttaaatgatggctgcttctaagccaacatcctggctgtctgggccttcccacatcgtttcccacttaaccatgactttgggaccttagctggcggtctgggttgtttccctcttcacgacggacgttagcacccgccgtgtgtctcccgtgataacattctccggtattcgcagtttgcatcgggttggtaagtcgggatgacccccttgccgaaacagtgctctacccccggagatgaattcacgaggcgctacctaaatagctttcggggagaaccagctatctcccggtttgattggcctttcacccccagccacaagtcatccgctaatttttcaacattagtcggttcggtcctccagttagtgttacccaaccttcaacctgcccatggctagatcaccgggtttcgggtctataccctgcaacttaacgcccagttaagactcggtttcccttcggctcccctattcggttaaccttgctacagaatataagtcgctgacccattatacaaaaggtacgcagtcacacgcctaagcgtgctcccactgcttgtacgtacacggtttcaggttctttttcactcccctcgccggggttcttttcgcctttccctcacggtactggttcactatcggtcagtcaggagtatttagccttggaggatggtccccccatattcagacaggataccacgtgtcccgccctactcatcgagctcacagcatgtgcatttttgtgtacggggctgtcaccctgtatcgcgcgcctttccagacgcttccactaacacacacactgattcaggctctgggctgctccccgttcgctcgccgctactgggggaatctcggttgatttcttttcctcggggtacttagatgtttcagttcccccggttcgcctcattaacctatggattcagttaatgatagtgtgtcgaaacacactgggtttccccattcggaaatcgccggttataacggttcatatcaccttaccgacgcttatcgcagattagcacgtccttcatcgcctctgactgccagggcatccaccgtgtacgcttagtcgcttaacctcacaacccgaagatgtttcacttcagagttgcgaaaatttgagagactcacgaacaactttcattgttcagtgtttcaattttcagcttgatccagatttttaaagagcaaatatatcaaacaagacttaacagtctgttttgagatattgaggtcggcgactttcactcacaaaccagcaagtggcgtcccctaggggattcgaacccctgttaccgccgtgaaagggcggtgtcctgggcctctagacgaaggggacacgaaaattgcttatcacgcgttgcgtgatattttcgtgtagggtgagctttcattaatagaaagcgaacggccttattctcttcagcctcactcccaacgcgtaaacgccttgctattcacttttcatcagacaatctgtgtgagcactgcaaagtacgcttctttaaggtaaggaggtgatccaaccgcaggttcccctacggttaccttgttacgacttcaccccagtcatgaatcacaaagtggtaagcgccctcccgaaggttaagctacctacttcttttgcaacccactcccatggtgtgacgggcggtgtgtacaaggcccgggaacgtattcaccgtggcattctgatccacgattactagcgattccgacttcatggagtcgagttgcagactccaatccggactacgacgcactttatgaggtccgcttgctctcgcgaggtcgcttctctttgtatgcgccattgtagcacgtgtgtagccctggtcgtaagggccatgatgacttgacgtcatccccaccttcctccagtttatcactggcagtctcctttgagttcccggccggaccgctggcaacaaaggataagggttgcgctcgttgcgggacttaacccaacatttcacaacacgagctgacgacagccatgcagcacctgtctcacggttcccgaaggcacattctcatctctgaaaacttccgtggatgtcaagaccaggtaaggttcttcgcgttgcatcgaattaaaccacatgctccaccgcttgtgcgggcccccgtcaattcatttgagttttaaccttgcggccgtactccccaggcggtcgacttaacgcgttagctccggaagccacgcctcaagggcacaacctccaagtcgacatcgtttacggcgtggactaccagggtatctaatcctgtttgctccccacgctttcgcacctgagcgtcagtcttcgtccagggggccgccttcgccaccggtattcctccagatctctacgcatttcaccgctacacctggaattctacccccctctacgagactcaagcttgccagtatcagatgcagttcccaggttgagcccggggatttcacatctgacttaacaaaccgcctgcgtgcgctttacgcccagtaattccgattaacgcttgcaccctccgtattaccgcggctgctggcacggagttagccggtgcttcttctgcgggtaacgtcaatgagcaaaggtattaactttactcccttcctccccgctgaaagtactttacaacccgaaggccttcttcatacacgcggcatggctgcatcaggcttgcgcccattgtgcaatattccccactgctgcctcccgtaggagtctggaccgtgtctcagttccagtgtggctggtcatcctctcagaccagctagggatcgtcgccttggtgagccgttaccccaccaacaagctaatcccatctgggcacatccgatggcaagaggcccgaaggtccccctctttggtcttgcgacattatgcggtattagctaccgtttccagtagttatccccctccatcaggcagcttcccagacattactcacccgtccgccactcgtcagcgaagcagcaagctgcttcctgttaccgttcgacttgcatgtgttaggcctgccgccagcgttcaatctgagccatgatcaaactcttcaatttaaaagtttgatgctcaaagaattaaacttcgtaatgaattacgtgttcactcttgagacttggtattcatttttcgtcttgcgacgttaagaatccgtatcttcgagtgcccacacagattgtctgataaattgttaaagagcagtgccgcttcgctttttctcagcggcgcggggtgtgcataatacgccttcccgctacagagtcaagcatttctttgcttttctctgttgagattctcaggagaaccccgccgacccggcggcgtgtttgccgttgttccgtgtcagtggtggcgcattatagggagttattccggcctgacaagcgaaaaatataaaaactttatcgttcgctcacttttcaggcaaaacatcttaaatatagtcttttccgtctaacttatagacaaaaacgagccccgaagggctcgttttatcatttactggacggcgacaatccggtcttcattaacttccaggcgaatcactttacccggaaccaattcaccagacagtatttgctgtgccagcgggttttcgatctgctgctgaattgcacgtttcagaggacgtgcaccatagaccggatcgtaaccgttctcgctcagcagtttcagcgcctcgtcagaaatgtggatttcataaccacgttcttccagacgtttgtacagacgtttcaactgaatctgcgcaatgctggcaatgtgctgttcacccagcggatggaagaccaccacttcatcgatacggttaatgaattccggacggaagttatggcttaccacaccgagcaccagctctttcatgtgcgcataatccagttcaccgaagcgttcctgaatcagatcggaaccgaggttagaggtcataatgacgaccgtattacggaagtcgaccgttctcccttgcccgtcagtcagacgcccatcatccagtacctgcaacagaatgttgaagacatccggatgcgctttttccacttcatccagcaggatgacggaatacggacgacgacgcaccgcttcggtcaggtagccaccttcttcataaccgacatatcccggaggcgcaccaaccaaacgagacacgctgtgtttctccataaactcggacatatcgatacggaccatcgcctcgtcgctatcaaacataaagttcgccagcgccttacaaagctctgttttccccacaccagttgggccgaggaacaggaaactaccaatcgggcgatttggatccgccagccccgcacggctacgacgaatagcgttagataccgcatcaaccgcttcgttctgaccaattacgcgatggtgcagttcttgctccatacgcagcagtttttcgcgctcgctttccatcatgcgagaaaccggaatccccgtccaacgcgccagcacttcagcaatttcggcgtcggtcactttattacgcaacagacgcatagttttgccttcgagctgcgttgcggcttccagttgcttttccagttccgggattttgccgtattgcagttcagacatccgcgccaggtcccccacacggcgagcctgttcaatagcgattttcgcctgttccagttccgctttaatggtctgcgtaccagaaaggcttgccttctctgctttccactcttcttctaactcggagtactgacgttctttgtcgctcagttcttcgttgagcatatccagacgttttttactggcttcatcagactctttcattaacgcctgttgttccagtttgagctggatgatacgacgatcgagtcggtcgagttcttctggtttactgtcaatctgcatacgaatgctggatgctgcttcatcgatcaggtcgatggctttatccggcagctgacggtcagcaatgtagcgatgagacaacgtcgccgctgcaacaattgccgggtcagtaatttgcacatggtggtgcaattcgtaacgttctttcaggccacgcagaatcgcaatggtatcttcaacagaaggctcggcaacaaacactttctggaaacgacgttccagcgcagcatctttttcaatgtactggcgatattcgtcaagcgtcgtggcacctacgcagtgcaattcaccacgcgccagcgccggtttcagcatgtttccggcgtccattgcgccatcggctttacccgcgccgaccatggtatgtaattcgtcgataaataggatgacgttgccttcctgtttggcaagatcgttaagcacgccttttaaacgttcttcaaactcaccgcgatatttcgccccagccaccagcgcgcccatatccagcgccagtacccggcggcctttcaacccttccggcacttcgccgttgataatacgctgcgccagaccttcaacgatggcagttttaccgacgccgggttcaccaatcagtaccgggttatttttagtacgacgttgcagcacctgaatggtacggcgaatttcttcatcacgaccaatcaccggatcgagtttgccctgttcggctcgttcggtaaggtcgatggtatattttttcaaagcctgacgttggtcttcagcaccttgatcgttcacgctttcacctccacgcatttgttcaatcgcttgagtaatgttggcggtggtcgcccctgctgctttcaggatgtcggccagcgtgccgcgagactcaagtgccgccagaacgaacagttcactgctgataaagttatcaccacgtttttgcgccagcttgtcgcaaagattaagaacgcgcaccagatcctgacttggctggacatcaccaccagtaccttcaacctgcggtaaacgatttaatgcctgattgatatctgtgcgcaactggccagcatttatgccagcggatgttaataaaggactaacgctacccccttcctgattcagcagggcgctcattaaatgaagtggttcgataaattggttgtcgtgcccgagtgcaagactttgggcatcggcaagagcaagctggaatttattagtaagacgatccagacgcataactcctcccataacggatcaaagttgctactggagattaaatgaggtcatccctcaattattcaaggttattgaccagattaatgtgaaaagaaaatcacgcgtaccggatcgtcttgattctttaggttatatcagccaaatgaaacttgccatacgaccggtggtcttgtcgcgacgataagagaagaaagtctcattttccgtatatgtacaacggtcgccgccgaaaatttgctcaacacccacgttcgccagacgctgccgggcaagctgataaatatccgccagatacttatcaccatgctgaatgaaagctgcacttgctttagcgtctactgccataaacgcctcgcgaacctccccccccacttcgaacgcgcgtggaccaattgccggccctaaccaggcgagaatattttccggattatcagcaaaacaggaaaccgtctcttccagcacgcctgcgcacagtccacgccagccagcatgagcggcggcgacttccgttcccgctcgattgcaaaacagcacagggaggcagtcggcagtcatcactgcgcaaaccgtgccgggcgtattgctataagaggcatccgcccgtttactggcataaggttcgccagtgagcttaagcacatctttgccgtgtacctgctcaagccagaccggtttagaaggcaaattgcccgcagcaaaaagtcgcttgcgattctcctcaacgtgatccgggttatcgccacaatgggcaccgaggttgagactgtcatacgggggcaagctcacgccgccgatacgagtggagctacaggccgcaacaccttttggctgcggccactgcgggacaatcagcttactcataaccagtccacttcatccttatgttcttcgaaatcggcgcgcatcacctcaatcagctccaccatatcttgtggaataggcgcatgccattccatttcgatgccggagatcgggtgataaagacgcagcatggttgcatgtagcgcctggcggtcaaacttacgcagcgtggagataaatgcttcgctagcaccttttggcggacgcggacggccaccataaaccggatcgcccaccagcggatgagtgatatgggccatatgcacgcggatctggtgcgtacgtccagtttccagacgcaaccgcagacgcgtgtgcacacggaagtgttccatgatgcgatagtgagtcaccgctggtttgcccatcggatgcaccgccatatgggtacgtttggtcgggtggcgactgattggctcgtccaccgtgccacctgcggtcatatgaccaatcgccaccgcttcatactcacgagtaatttcacgccgttgcaaagattcgactaaacgcgtctgagccggaacggtttttgccacaaccatcaggccagtggtgtctttatccagacgatggacgatgcccgcacgcggtacatcggcaatgggtggatagtaatgaagcaacgcattcagtaccgtgccatccgggttacccgcgccaggatgtaccaccaggtcgcgcggtttattaatgataataatgtcttcatcttcatagacgatatccagcgggatatcctgcggttcaaaacgcgcttcttcttcaatctcagcgttgatggcaacctgctcgccacccaatactttttctttcggcttatcacaaactttgccgttaaccagcactcgctggtcgaggatccattcttttattcggctacgactataatccgggaacatttcggccaaagcctgatctaagcgttgaccgagttggttttcggacaccgttgcagtgagctgtactcgttgtgccatatatactgcttcttcgtttatcgttggggttttacggctttgccgtttaatatagtgtgctattgtagctggtcttaaccgggagcaggaacagagaatctcccgtattacattttgaggaaagtcaaaacgtcatgacgcgcatgaaatatctggtggcagccgccacactaagcctgtttttggcgggttgcagcgggagtaaggaagaagtacctgataatccgccaaatgaaatttacgcgactgcacaacaaaagctgcaggacggtaactggagacaggcaataacgcaactggaagcgttagataatcgctatccgtttggtccgtatagccagcaggtgcagctggatctcatctacgcctactataaaaacgccgatttgccgttagcacaggctgccatcgatcgttttattcgccttaacccgacccatccgaatatcgattatgtcatgtacatgcgtggcctgaccaatatggcgctggatgacagtgcgctgcaagggttctttggcgtcgatcgtagcgatcgcgatcctcaacatgcacgagctgcgtttagtgacttttccaaactggtgcgcggctatccgaacagtcagtacaccaccgatgccaccaaacgtctggtattcctgaaagatcgtctggcgaaatatgaatactccgtggccgagtactatacagaacgtggcgcatgggttgccgtcgttaaccgcgtagaaggcatgttgcgcgactacccggatacccaggctacgcgtgatgcgctgccgctgatggaaaatgcataccgtcagatgcagatgaatgcgcaagctgaaaaagtagcgaaaatcatcgccgcaaacagcagcaatacataacagaaacctgaaacacaaaacggcagcccttgagctgccgtttttttattctgtcagttgtgaaactgaagcgatttagtcgctatcgatctcatcaaatatggctcgctttgagatattcctcaagtaaaaaaacatctcttcctgcgatttctcacaaaaaagattcgttgacaaaaagtgacaaaattatgagattttcatcacacattttgacatcaggaacggtatgctgaattcaccaagacgggaagacaagaggtaaaatttatgacaatgaacattaccagcaaacaaatggaaattactccggccatccgccaacatgtcgcagaccgtctcgccaaactggaaaaatggcaaacacatctgattaatccacatatcattctgtccaaagagccacaagggtttgttgctgacgccacaatcaatacacctaacggcgttctggttgccagtggtaaacatgaagatatgtacaccgcaattaacgaattgatcaacaagctggaacggcagctcaataaactgcagcacaaaggcgaagcacgtcgtgccgcaacaagcgtgaaagacgccaacttcgtcgaagaagttgaagaagagtaatcctttatattgagtgtatcgccaacgcgccttcgggcgcgttttttgttgacagcgtgaaaacagtacgggtactgtactaaagtcacttaaggaaacaaacatgaaacacataccgtttttcttcgcattcttttttaccttcccctgaatgggaggcgtttcgtcgtgtgaaacagaatgcgaagacgaacaataaggcctcccaaatcggggggccttttttattgataacaaaaaggcaacactatgacaagcgaaaacccgttactggcgctgcgagagaaaatcagcgcgctggatgaaaaattattagcgttactggcagaacggcgcgaactggccgtcgaggtgggaaaagccaaactgctcagccatcgcccggtacgtgatattgatcgtgaacgcgatttgctggaaagattaattacgctcggtaaagcgcaccatctggacgcccattacattactcgcctgttccagctcatcattgaagattccgtattaactcagcaggctttgctccaacaacatctcaataaaattaatccgcacagtgcacgcatcgcttttctcggccccaaaggttcttattcccatcttgcggcgcgccagtatgctgcccgtcactttgagcaattcattgaaagtggctgcgccaaatttgccgatatttttaatcaggtggaaaccggccaggccgactatgccgtcgtaccgattgaaaataccagctccggtgccataaacgacgtttacgatctgctgcaacataccagcttgagcattgttggcgagatgacgttaactatcgaccattgtttgttggtctccggcactactgatttatccaccatcaatacggtctacagccatccgcagccattccagcaatgcagcaaattccttaatcgttatccgcactggaagattgaatataccgaaagtacgtctgcggcaatggaaaaggttgcacaggcaaaaagtccgcatgttgctgcgttgggaagcgaagctggcggcactttgtacggtttgcaggtactggagcgtattgaagcaaatcagcgacaaaacttcacccgatttgtggtgttggcgcgtaaagccattaacgtgtctgatcaggttccggcgaaaaccacgttgttaatggcgaccgggcaacaagccggtgcgctggttgaagcgttgctggtactgcgcaaccacaatctgattatgacccgtctggaaagtcgcccgattcacggtaatccatgggaagagatgttctatctggatattcaggccaatcttgaaagtgcggaaatgcaaaaagcattgaaagagttaggggaaatcacccgtagtatgaaggtattgggctgttacccaagtgagaacgtagtgcctgttgatccaacctgatgaaaaggtgccggatgatgtgaatcatccggcactggattattactggcgattgtcattcgcctgacgcaataacacgcggctttcactctgaaaacgctgtgcgtaatcgccgaaccagtgctccaccttgcggaaactgtcaataaacgcctgcttatcgccctgctccagcaactcaatcgcctcgccgaaacgcttatagtaacgtttgattaacgccagattacgctcactgctcataatgatgtcggcataaagctgcggatcctgagcaaacagtcgcccgaccatcgccagctcaaggcggtaaatcgggctagagagcgccagaagttgctcaagctgaacattttcttctgccaggtgcagcccgtaagcaaaagtagcaaagtggcgcagtgcctgaataaacgccatattctgatcgtgctcgacggcgctaatacgatgcagccgagcgccccagacctgaatttgctccagaaaccattggtatgcttccggtttacgtccatcacaccagaccacaacttgctttgccaggctaccgctgtccggaccgaacatcgggtgtagccccagcaccggaccatcatgcgccaccagcatggcctgtaatggcccatttttcacacttgccagatcgaccagaatacaatctttcggtaaaggcggtaatttgccaataacttgctcagtaacgtggattggcacactaacaatcaccattccggcatcggcaacaatatcagccgctcgatcccagtcatgttgctccagaatccgcacctgataaccgctgagggtcagcatcttctcgaacaggcgtcccatctgaccgccaccgccgacgataaccaccggacgcagactcggacaaagtgttttaaatcctttgtcgttttcactggagtaagattcacgcatcacccgacgcaaaacatcctcaatcagatctggcggtacacccagagcttccgcctctgcacgacggctggccaacatagatgcctcgcgctccggaacataaataggcagtccaaagcggcttttcacctcgcccacttcagcaaccagttccagacgcttcgctaataaattcagcagcgctttatcgacttcatcaatttgatcgcgtaatgcggtcaattcagcaaccataataaacctcttaagccacgcgagccgtcagctgcccgttcagatcctgatgaatttcacgcagcaaggcatcggtcatttcccagctaatgcaggcatcggttacggatacaccgtatttcatttcactgcgcggttgctcggaagactgattgccctcgtggatattactttcgatcatcagaccaataatactgcgattgccatctttgatttgagcaaccacggattctgccaccgcaggctgacggcgataatctttattggaattaccgtggctgcaatctaccatcagagacgggcgcagtcccgcctgttccatctctttttcacattgcgcaacatccgcagggctatagttcggcgctttaccaccgcgcaggatcacatggccgtccggattcccctgagtttgtagcaacgcaacctgccctgcctggttaatgccaacaaaacggtgcggctgggcggcggcgcgcatagcgttaattgctgttgccagactgccgtcggtgccgtttttaaaaccaaccggcatggaaagcccggaggccatttcacggtgagtttggctttccgttgtacgagcaccaattgcactccagctaaacagatcgcccaggtattgcgggctattcggatctaacgcttccgtcgccagtggcagtcccatattcaccagctcaagcagcaatttacgcgcgatctgcagcccggcttctacatcaaaagagccatccatatggggatcgttaattaaccctttccagccgacagtggtacggggtttttcaaaatagacgcgcattaccagatagaggctatcgctgacctctgcggcaagggctttaaatcgacgagcatattccagagcagtttccggatcatgaatggaacaaggaccacatactaccagcagacgaggatcgcgcccggcgataatatcactaatgcttttacggctgtcagcaatctgggcttcttgttgcaggctcaatggaaaagcggccttcagttgttccggagtcattaaaacctgttcgtcggtaatatgtacgttattcagcgcgtctttttgcatgatggcgatcctgtttatgctcgtttgcgatagttgatcctcagcgaggatgacgtaacgataacacataaagtaaagttttcaatccatatttcgtacatttttatttacacaggcaatttagtcgcgctttcaacccttacctctgtatagataaatttacactccctttgaaaacaatccgctatgctttgaaaaaggagaaagaaatgatgaaaaagtttatcgcccccttgttggctttactggttagcggatgtcagattgatccttatactcacgcgccaaccttgaccagcaccgactggtatgatgtcggtatggaagatgcgataagcggcagcgccataaaagatgacgatgcatttagcgatagtcaggcggatcgcggtctataccttaaaggatatgccgaaggacaaaagaaaacttgccagaccgattttacttatgcccgaggactttccggtaaaagctttcctgccagctgcaacaatgttgaaaatgccagccaactgcatgaagtaggcaaaaaggggctgatgaaaatgccagcacaatacgattaaattaattaaaaccccacaaataaattaaacataagattttactcattgtgttttatttctcacattgatgacggtcgcatgaaaaaatgatattttaatgagcattctgaaaaaatatcgatgcatttcgagcgaagatggtggggatccctgaatgcgtttttctcaccgactgttcttacttctgattctcctgctgacgggagcaccaatactcgctcaggagccttctgacgttgcgaaaaacgtgcgtatgatggtttccggtattgtcagttacacccgctggcctgcgctaagtgggccaccaaagttatgtatctttagttctagtcgttttagtaccgccctacaagagaatgccgcgacatctttgccttatctgcctgtcatcattcacactcaacaagaggcgatgattagtggctgcaatggtttttattttggcaacgagagtccgacattccagatggaattaaccgaacaatatccgagtaaggcgttattattaattgccgaacaaaataccgagtgcattattggtagcgccttttgtctgatcatccacaataatgacgtcagatttgccgtaaacctggatgccttaagccgtagcggtgtaaaggtcaacccggatgtcttaatgctcgcacggaagaaaaatgatggataacgataattctcttaataagcgccccacgtttaaaagagcattacgcaacatcagtatgaccagcatatttatcactatgatgctgatctggttgctgctttccgtgaccagcgtgctgaccctgaaacagtacgcgcaaaaaaacctggcactgacagcagcaacaatgacttacagtctggaagcagctgtcgtttttgccgatggccctgcagcaactgaaacactggcagcgctgggccagcaagggcaatttagtactgcagaagtacgtgataagcagcaaaatattctggcatcctggcattacacccgtaaggatccaggcgatactttcagtaatttcataagccactggctcttccctgcccccatcattcagccgattcgtcacaatggtgaaaccattggcgaagtacgcttaaccgctcgcgacagtagtatcagccattttatctggtttagcctcgccgtactgaccggttgtattctgctggcaagtggcatcgcaattaccctcacccgccatttgcacaatggcctggtagaagcgctgaaaaatatcaccgatgtcgtacatgatgtgcgttccaaccgcaatttttcccgacgagttagcgaagaacgtatcgctgagtttcaccgcttcgctctcgacttcaacagtctgctggatgaaatggaagagtggcagcttcgtttacaggctaaaaatgcgcagcttctacgtaccgcgctacatgacccattaaccgggctggctaaccgcgcagcgtttcgtagcggcatcaacacgttgatgaacaattccgatgcccgaaaaacgagcgcgttactatttcttgatggcgataatttcaaatacatcaatgatacctggggtcatgcgacgggcgatagagtcttgattgaaatcgcaaaacggttagctgaatttggcgggctgcgacataaagcataccgcctgggcggcgatgaattcgctatggtgctctatgatgtacagagcgaatctgaagtgcagcagatatgtagtgcactgacacaaatctttaatctcccgtttgatcttcataatggccatcagaccaccatgacattaagcattggttacgcgatgaccattgagcacgcctctgcggaaaaattacaagagcttgccgatcacaatatgtatcaggccaaacaccagcgtgccgaaaagctggtgagataacaaggatatatcgatatgataaagcacctggtagcacccctggttttcaccagtctaatactgactggctgccagtcccctcagggaaagtttactcctgagcaagtcgccgctatgcaatcttatggatttactgaatccgccggcgactggagcctgggcttaagtgatgccattctgttcgcaaaaaatgactacaaattgctcccggaaagccagcaacagatccaaaccatggcagctaaattggccagcacagggctaacacatgcccgtatggatggacacaccgataactatggtgaagacagttacaacgaaggcttaagtttgaaacgggcgaatgtcgtggccgatgcatgggctatgggtggacaaattccacgcagcaatctcaccacacagggtttaggaaaaaaatatcccatagccagtaacaagaccgcccagggccgcgccgagaaccgccgcgtcgcagtggtgattactaccccttaaaacaccagcaaacagataaaaaagggccagccaattggccagcccttcttaacaggatgtcgcttaagcgaaatcttagttaagacgctctttgatacgagcagccttaccagtacgctcacgcaggtagtacagtttagctttacgaacagcaccacgacgtttgacagaaatgctgtcaactaccggagagtgagtctggaagacacgctcaacgccttcgccgttggaaattttacgaacagtgaatgcagagtgcagaccgcggttacgaatagcgataaccacgccctcgaatgcctgcagacgttttttggaaccttcaacaacccatactttcacttccacggtatcacccggacggaaggaaggtacgtcctgcttcatctgctcttgttcaagttgcttaataatgttgctcataatttaatctcttatcctgggtaaactgatatctcgggggcttacgccatcccatcatgtttatgttgctgttgtgcgtgttccgttttgaactccgccagcaaccttgcttgctcttcagtcagagccaggttttccagaagttcaggtcttctaagccaggtacggcccaggctctgtttcaaacgccagcgacgtatctcggcatggttgccgctcagtaacactggcggaacttccatcccttctaacacctcaggccgcgtatagtgcgggcaatccagcaatccttcagcaaaggaatcttccgttgcgctggcttcatgtcccagtactcccggaataaaccgggaaacggagtcaatcagcgtcattgctggtaactcaccaccactgagaacgtaatcgccgatactccattcttcgtcaatttcggtttggatcacgcgctcatctataccttcgtagcgaccgcacaccagaatcaatttttgattcgttgccagttcgctgacgcccgcttgatcaagcttgcgtccctgtggactcagataaatcacctttgcgccttcacccgccgcggcttttgctgcatgaatggcgtcccgcaagggttgcaccatcattaacatccccggtccgccgccgtaaggacgatcgtccacggtacggtgccggtcatgcgtgaagtcgcgaggactccagctctggatgctcagcaggccatttttaactgcccggccagttaccccgtaatcggtaattgcgcggaacatttcaggaaacaggctaattatgccaatccacatagcgccgtcttttaccgtttatccggtggtttaaaaaccaggatcccaatctacttcgatactacgagtagtgagatcgactttcttgataacctgcccatcgaggaacggtacgagacgttccttgataccaaacgcatctttcaggtttgccttaatgacgagaacgtcattagatccggtttccatcatatcgacgactttaccgagatcgtagccttcagtggttactacctggcagcccatcaggtctttccagtagtagtccccctcttcaagctgaggcagctggctactatccacgacaatttcacaattcgtcagcaggttcgccgcatcacgatcgtcaacgcctttcagcttgatgatcatgtcctgattgtggtgcttccagctttccagctggacttgctgccactgacccgccttctggataaaccagggctgatagtcaaaaatgctttcggcgtcttcggtggaagaaaacactctgagccacccacgaataccgtaagagctacccatttttcccaaaacgatgggatcaacaggtgcttgcgcggtgagttgtttgctcatcatgaccaccgtgacagattaagctgctttgtttacttctttgatcagcgcagcaacgcgatcagaaatagttgcgccctggccaacccagtgagcgatgcgatccagatccaggcgagtgccttcttctttttcgctagcgattgggttgaagaaaccaacgcgctcgatgaagcgaccgttgcgtgcattacggctgtcagcgacaacaacctggtagaacggacgctttttagcgccgtgacgtgctaaacgaatagttaccataacatcctcttgtgtgaataaaacaaccggaccccatcgaggaacggagtccggtgtcatattaaaagcccgaaaattttactcatttttgcgggaattgcaatcaacagttgctaactctgctgtaaaaggccgtcggcggtgcagccagtttggtgccggagtgcgcgcagtcaccggagcgtacacgcagtacgtgaggatgacgagcacatcccggtgccaaaatggcaaacaagccaggccgattagcgaccagggaagcctgggggcatcatacccttcatgcttctcatcatcttcgccattccgcccttcttcattttcttcatcatgcgctgcatgtcgtcgaactgtttcagaagacggttaacgtcctgcacctgcataccgcaaccggcagcaatacggcgtttacggctacctttgatgatttctggcttagcgcgctctttcatcgtcatgctgttgatgatggcttccatacgcaccagcactttatcgtccatctgactcttgacgttatccgggatctgccccatgcccggcagcttgcccatcagactagccatgccgcccatatttttcatctggcgcagctgctcaagaaagtcgttgagatcgaagccgtcaccttttttcagcttgctggctaatttctctgcctgcgcgcggtcaactttgctttcgatatcttcgatcaggctcagtacgtcgcccatgccgagaatacggctcgcgatgcggtccggatggaacggctccagcgcctcagttttctcgccaacaccgaggaacttgatcggtttgccagtgatgtgacgaatagagagcgccgcaccgccgcgggcatcgccgtccactttggtcaacactacgccggtaagcggtaacgcttcattgaatgcttttgccgtattggccgcatcctgaccggtcatggcgtcaaccacaaacagggtttcaaccgggttaatgctcgcatggacttgtttgatctcgtccatcatcgcttcgtcaacgtgcagacgaccagcggtatccaccagcagcacgtcgtagaatttcagtttggcttctttcagcgccgcgttaacgatatctaccggcttctgaccaacatcagaagggaagaaatcaacgcccacctgctctgccagcgtctcaagctgtttgattgccgccgggcgataaacgtcggcagaaaccaccagcactttcttcttgtgcttctcgcgcaggaacttaccgagtttaccaacgctggttgttttaccggcaccttgcaggcccgccatcagtacgaccgcaggcggttgcgcagccaggttcagggtctggttctcttcgcccatcgccgcaaccagttcgttacggactattttgacgaactcctgccccggcgtcaggctcttattaacttcatgaccaaccgctttctcttttacgcgattgataaactcacgcactaccggcagagctacgtccgcctccagcagcgccatgcgcacttcgcgcagcgtatcttttacgttgtcttcagtgaggcgtccacggccactgatattgcgcagcgtgcggctcaaacgatcggttaaattatcaaacattgtctctcgcctggggtggaaacggttggccgcaatcgcgacacatcatcagtattttgccgcagtataacatgaaggcgtctttgttgttatgcaacggttggagcagcgtagtcctgacgctatactgcttctctttcttattgctcaaactgtcgacatcactatgcccgtttttgctctgctcgcgcttgtcgcctactccgtcagtcttgcgctgattgttcccggtctgctgcaaaaaaacggcggctggcggcgcatggctattatttctgcggtcattgcgctggtctgccacgcaatcgctctggaagcccgcatcctgcccgacggtgatagcggacaaaacctcagcctgctgaacgttggtagtttggtcagtttgatgatctgtacggtaatgaccattgtggcttctcgcaatcgtggctggctgctgctacccattgtctatgcctttgcgcttatcaacctggcgctggcaaccttcatgcccaatgaatacatcacccatctggaagctacgcctgggatgctggtgcacattggcttaagcctcttttcctatgccacgctaattatcgccgccctgtacgcgctgcaactggcgtggattgattaccaactgaagaacaagaagctggcgtttaaccaggaaatgccgccattgatgagtatcgagcgtaaaatgttccacatcacgcagattggcgtggtgctgctaacgctcacgctttgcactggcctgttctacatgcacaacttatttagcatggaaaatatcgacaaggctgtgctctctatcgtggcgtggtttgtctatattgtgctgctgtggggacattatcatgaaggatggcgtggacgccgcgtcgtctggtttaacgttgcgggcgcggtaattctgacactggcctacttcggcagccgaattgtccagcagttaatcagctaaacccagaaaaggagtttcccctggaacacatttctactactacgttgatcattattctgatcatcatggtggtcatttcagcctatttttccgggtccgaaaccggaatgatgaccctcaaccgctatcgtctgcgacatatggcgaaacagggtaatcgcagcgccaaacgcgtcgaaaaattgctgcgtaagccagaccgcctgataagcctggtgttaatcggcaataacctggtcaatattcttgcctccgcgctcggcactattgttgggatgcgtttgtacggcgatgcgggcgtggcaattgcgactggtgtgctgacttttgtcgtactggtatttgctgaggtattgccgaaaaccattgccgcgctgtacccggaaaaagtcgcttatccgagtagttttctgctggctccgctgcaaattttgatgatgccgctggtctggttgctgaatgctatcacccgtatgctgatgcgcatgatgggtatcaaaaccgatatcgtggttagcggctctttgagcaaagaagagttgcgcactatcgtgcacgaaagtcgcagtcaaatttcccgtcgcaatcaggatatgctgctgagcgtgctcgatctggaaaaaatgaccgttgatgacatcatggtgccgcgcagtgaaattatcggtattgatatcaacgatgactggaaaagcattctgcgccaactctcccacagtcctcacgggcgcatcgtgctctaccgtgatagcctggacgacgccatcagtatgctgcgagtacgtgaagcctggcggttgatgagcgagaaaaaagagttcaccaaagaaaccatgctgcgcgccgcggacgagatctattttgtgccggaaggtacgccgctcagcacgcagttggtaaagtttcagcgcaacaaaaagaaagtcggcctggtcgtcaacgagtatggagacattcaggggctggtgacggttgaagatattctggaagagattgtcggcgatttcactacgagcatgagcccaacacttgccgaagaggtcacgccgcaaaacgacggtagcgtgattatcgatggcaccgccaacgtgcgggaaatcaacaaagcctttaactggcatctaccggaagatgatgcccgcacggttaatggcgtcattcttgaggcactggaagagatccctgtcgcaggcacccgcgtgcgtattggcgagtacgatatcgatattctcgacgtacaggacaatatgattaagcaggtaaaagtttttcctgtgaaaccgctgcgcgagagtgtggcggagtaacgaaaacggcccggcattcgcatgcagggccgtgaattattacgaaagcagaaattaagcttttgctttcgctacagtaaccatcgccgcacgaatcgtacgaccattcagcgtataacccttctgcataatgcccagtacgttacctggcgcaacgtcatcagattccaccattgcgatggcctgatgcacattcgggtccagtgggacgttagtttcggcgatcacttcaacgccaaacttacgcacaacatccagcatgctcttcagcgtcagctcaatgccttcaaccatcgcagacatatccgggttagctttatcagccacttccagcgcacgatccaggctatcaatcaccggcagcaattcgttgatgaatttctccagcgcgaatttgtgggctttttcaatatccagttcagtacgacgacgcaggttttccatttcggcttttacacgcaaaatgccgtcacgttcacgggtctgggcttcagccagctgagcttcgagattcgcaactttttcatcgcgcggatccacctgctcagcagaagcttctggctcaactgcctcaatctcttcgtgctgatccatgataatttcttccggggcttgcccctcaggcgttttctgttctttactactcatgaatttctccgcgtttttttcgcattcatctcgctaacttcgcttattatggggatcagtttcagggtttcaagggaagcactcacattgtcatcaatcttcgcaacaaggacctcggaaaaatgaataatcatttcaagtgtattggcattgtgggacacccacggcaccccactgcactgacaacacatgaaatgctctaccgctggctgtgcacaaaaggttacgaggtcatcgttgagcaacaaatcgctcacgaactgcaactgaagaatgtgaaaactggcacgctcgcggagattgggcaactagctgatctcgcggtagtcgttggtggcgacggtaatatgctgggcgcggcacgcacactcgcccgttacgatattaaagttattggaatcaaccgtggcaacctgggtttcctgactgaccttgaccccgataacgcccagcaacagttagccgatgtgctggaaggccactacatcagcgagaaacgttttttgctggaagcgcaagtctgtcagcaagattgccagaaacgcatcagcaccgcgataaatgaagtggtgcttcatccaggcaaagtggcgcatatgattgagttcgaagtgtatatcgacgagatctttgcgttttctcagcgatctgatggactaattattagcacgccaacaggctccaccgcctattccctctctgcaggcggtcctattctgaccccctctctggatgcgattaccctggtgcccatgttcccgcatacgttgagtgcacgaccactggtcataaacagcagcagcacgatccgtctgcgttttagccatcgccgtaacgacctggaaatcagttgcgacagccagatagcactgccgattcaggaaggtgaagatgtcctgattcgtcgctgtgattaccatctgaatctgattcatccgaaagattacagttatttcaacacattaagcaccaagctcggctggagtaaaaaattattctaattttacgccagcctctttactgtatataaaaccagtttatactgtacacaataacagtaatggtttttcatacaggaaaacgactatgttggcacaactgaccatcagcaactttgctatcgttcgtgagcttgagattgattttcatagcggcatgaccgtaataactggcgagaccggcgcgggtaaatctattgcaatagatgccctcggtctttgtctcggtggtcgcgctgaagccgacatggtgcgtaccggcgctgctcgcgctgacctgtgcgcccgtttttctctgaaagatacgccagcggctctgcgctggctggaagaaaaccagcttgaagacgggcatgaatgtttgcttcgtcgcgtgatcagcagcgatggtcgctcccgtggtttcatcaacggtacagctgttcctctgagtcaactgcgcgaactgggtcagttgctgattcagatccatggtcagcacgctcatcaattactcaccaaacctgagcaccaaaaattcctgcttgatggctatgccaatgaaacctctctactgcaggaaatgaccgcacgttatcagttgtggcatcaaagctgccgtgacctcgcgcatcatcaacagttaagtcaggaacgcgccgcccgtgcggaactgctgcaataccaattaaaagaacttaacgaatttaatccgcagcccggagagtttgaacaaatcgacgaagagtacaaacgtctggcgaacagcggtcaattgctgaccaccagccagaatgcattggcattaatggccgacggtgaagacgcaaacctgcaaagtcagctttacacggctaaacaactggtgagcgaattgattggcatggacagcaaactgtccggcgtacttgatatgctggaagaagctaccatccagattgctgaagccagcgatgaactgcgccactactgcgatcgtctggatctcgatcccaaccgactatttgaacttgaacagcgcatcagtaaacagattagcctggcacgtaaacatcacgtcagccctgaggcattgccacagtattaccagagcctactggaagaacagcagcaactggacgatcaggccgacagtcaagaaacgcttgcgctggcggtaacgaaacatcatcagcaggcactggaaatcgcgcgcgcattacaccaacaacgccagcaatatgcagaagaacttgcacagctgatcaccgacagtatgcatgcgctcagtatgccgcatgggcagtttacgatcgatgttaaatttgacgagcatcacctgggcgctgacggtgccgatcgtattgagtttcgggtaaccaccaacccaggtcagccaatgcagcctattgccaaagtcgcatccggtggtgaattgtcccgcatcgcactggcaatccaggtcatcacggcgcgtaaaatggaaaccccggcactgatttttgatgaagtggatgtagggattagcggtccaacagcggcagttgtcggcaaactgctgcgtcaactcggcgaaagtactcaggtgatgtgtgttacccacctgccacaagtcgcgggatgtggtcatcaacactattttgtcagcaaagaaaccgatggtgcgatgacagaaacgcatatgcaatccctgaataaaaaagcgcggttacaagagctggcgcgcctgcttggtggcagtgaagtcacacgtaatacactggcgaatgcgaaagaactgcttgcagcgtaaacttttttcctgcttcacggtcagagtaaacagcaaaacgccgtaagaccggaaagcaaaaggttttaaagtgatgaaaggtctattatcatcggcatattacagatgagccacgtactgctcgggcccgaaaaggaatcaaatcactatgcgctgtaaaacgctgactgctgcagcagcagtactattgatgttgaccgcaggctgttccactctggagcgagtggtttaccgtcctgacatcaaccaggggaactatctgaccgctaacgacgtatccaaaatacgtgttggcatgacgcaacaacaagttgcgtacgcattgggtacaccgctgatgtccgatccatttggtacgaatacctggttctatgtcttccgccagcaaccaggtcatgaaggtgtaactcagcaaacgctgacgctgacctttaacagtagcggtgtgttgaccaatattgataacaaacctgcgctgagtggtaactaataataaagttgctctcaaagacgttaaaaaaggtgctcaatgagcaccttttttctgtctgttatttattcgcacttttttctgctcgttgcctgcgaagctctttcggatcggcaatgagagggcgataaatctccacccgatcgccatcatgcacactatcgcttagttttgccggacggctgtaaatgccgactttgtttttagttaaatcgatatcggtacgcaattccagcaagccactggcgcgaatagcttcttcaaccgtcgcgccctcctgcagcgtcactcgctgcaggtactgcttctcaggtagcgcataagccacctcaacggcaattttacctggcactgtaaacctctttcgcacgaaccgtaaaagcctggaccatattagccgccagctctttaaacacgcgaccaaaggcgagttcaatcaacttattggtaaactcaaagtcgagatgaaactcgatacgacacgcctcctggctcagcggcgtaaacttccatccaccaatcaatttcttgaacggcccatccaccagattcataagaatactttggttactggtcaactggttgcgggtagtaaacgttttgctgatcccagccttagagacatctaccgccgcagtcatctgcccaggagtggactccagaatccgacttccggtacaacccggcaaaaactgaggataagactgaacgtcattcactaactgatacatttgctccgcgctgtagggtaccagtgcggtccggctaatctgaggcataacaatttccatcaacaaaaatccaacaaataatatcatttatcctgctgtaaaaaaaacgctatcccggcgctgggtaacatcgggttcatgctaagatagagccttgtcccccgcaggattgatatggggtgttttcgatttcagattaccgatgattcacgacgcttatgacgaagaaaaaagcacataaacctggtagtgcgaccatcgcgcttaacaagcgcgcccgtcacgaatactttatcgaagaagagttcgaagcgggacttgccctgcaaggctgggaagttaaatccctgcgcgcaggaaaagccaatatcagcgacagctacgtccttctgcgtgacggagaggcatttctgtttggcgctaacatcacgccaatggccgtggcctccacgcatgtggtgtgcgatcctacccgtacccgcaagttacttctcaaccagcgcgaactggacagtttgtacggtcgcgtcaatcgagaaggctataccgtagtggcgctctccctgtactggaaaaatgcctggtgcaaagtgaaaatcggcgtcgccaaaggtaagaaacagcacgataaacgtagtgatatcaaagagcgcgaatggcaggtggataaagcacgtatcatgaaaaacgcccaccgttaaacctgcactccaattattgaccagttcctcaccgcgcctccctctccggcggcgcgaatgaacatcttattggctatcacatccgacacaaatgttgccatcccattgcttaatcgaataaaaatcaggctacatgggtgctaaatctttaacgataacgccattgaggctggtcatggcgctcataaatctggtatacttacctttacacattggggctgattctggattcgacgggatttgcgaaacccaaggtgcatgccgaggggcggttggcctcgtaaaaagccgcaaaaaatagtcgcaaacgacgaaaactacgctttagcagcttaataacctgcttagagccctctctccctagcctccgctcttaggacggggatcaagagaggtcaaacccaaaagagatcgcgtggaagccctgcctggggttgaagcgttaaaacttaatcaggctagtttgttagtggcgtgtccgtccgcagctggcaagcgaatgtaaagactgactaagcatgtagtaccgaggatgtaggaatttcggacgcgggttcaactcccgccagctccaccaaaattctccatcggtgattaccagagtcatccgatgaagtcctaagagcccgcacggcgcaagccctgcgggcttttttgtgccctcaatttgtcccgcgaagtccgaagagaactaattaaatccgaaccttttaggcccattgataggcccaacgaaaagctctattgtttacgttgggctaaacgcagggagactccccacctttgaaaacaggatgtagcgatgaaacttaacgacagtaacttattccgccagcaggcgttgattaacggggaatggctggacgccaacaatggtgaagccatcgacgtcaccaatccggcgaacggcgacaagctgggtagcgtgccgaaaatgggcgcggatgaaacccgcgccgctatcgacgccgccaaccgcgccctgcccgcctggcgcgcgctcaccgccaaagaacgcgccaccattctgcgcaactggttcaatttgatgatggagcatcaggacgatttagcgcgcctgatgaccctcgaacagggtaaaccactggccgaagcgaaaggcgaaatcagctacgccgcctcctttattgagtggtttgccgaagaaggcaaacgcatttatggcgacaccattcctggtcatcaggccgataaacgcctgattgttatcaagcagccgattggcgtcaccgcggctatcacgccgtggaacttcccggcggcgatgattacccgcaaagccggtccggcgctggcagcaggctgcaccatggtgctgaagcccgccagtcagacgccgttctctgcgctggcgctggcggagctggcgatccgcgcgggcgttccggctggggtatttaacgtggtcaccggtagcgcgggcgcggtcggtaacgaactgaccagtaacccgctggtgcgcaaactgagctttaccggtagcaccgaaattggccgccagttaatggaacagtgcgcgaaagacatcaagaaagtgagcctggagctgggcggtaacgcgccgtttatcgtctttgacgatgccgacctcgacaaagccgtggaaggcgcgctggccagcaaattccgcaacgccgggcaaacctgcgtctgcgccaaccgcctgtatgtgcaggacggcgtgtatgaccgttttgccgaaaaattgcagcaggcagtgagcaaactgcacatcggcgacgggctggataacggcgtcaccatcgggccgctgatcgatgaaaaagcggtagcaaaagtggaagagcatattgccgatgcgctggagaaaggcgcgcgcgtggtttgcggcggtaaagcgcacgaacgcggcggcaacttcttccagccgaccattctggtggacgttccggccaacgccaaagtgagcaaagaagagacgttcggccccctcgccccgctgttccgctttaaagatgaagctgatgtgattgcgcaagccaatgacaccgagtttggccttgccgcctatttctacgcccgtgatttaagccgcgtcttccgcgtgggcgaagcgctggagtacggcatcgtcggcatcaataccggcattatttccaatgaagtggccccgttcggcggcatcaaagccagcggtctgggtcgtgaaggtagcaagtatggcatcgaagattacttagaaatcaaatatatgtgcatcggtctttaactggagaatgcgaatgaacagcaataaagagttaatgcagcgccgcagtcaggcgattccccgtggcgttgggcaaattcacccgattttcgctgaccgcgcggaaaactgccgggtgtgggacgttgaaggccgtgagtatcttgatttcgcgggcgggattgcggtgctcaataccgggcacctgcatccgaaggtggtggccgcggtggaagcgcagttgaaaaaactgagccacacctgcttccaggtgctggcttacgagccgtatctggagctgtgcgagattatgaatcagaaggtgccgggcgatttcgccaagaaaacgctgctggttacgaccggttccgaagcggtggaaaacgcggtaaaaatcgcccgcgccgccaccaaacgtagcggcaccatcgcttttagcggcgcgtatcacgggcgcacgcattacacgctggcgctgaccggcaaggtgaatccgtactctgcgggcatggggctgatgccgggtcatgtttatcgcgcgctttatccttgcccgctgcacggcataagcgaggatgacgctatcgccagcatccaccggatcttcaaaaatgatgccgcgccggaagatatcgccgccatcgtgattgagccggttcagggcgaaggcggtttctacgccagcagcccagcctttatgcagcgtttacgcgctctgtgtgacgagcacgggatcatgctgattgccgatgaagtgcagagcggcgcggggcgtaccggcacgctgtttgcgatggagcagatgggcgttgcgccggatcttaccacctttgcgaaaagcatcgcgggcggcttcccgctggcgggcgtcaccgggcgcgcggaagtaatggatgccgtcgctccaggcggtctgggcggcacctatgcgggtaacccgattgcctgcgtggctgcgctggaagtgttgaaggtgtttgagcaggaaaatctgctgcaaaaagccaacgatctggggcagaagttgaaagacggattgctggcgatagccgaaaaacacccggagatcggcgacgtacgcgggctgggggcgatgatcgccattgagctgtttgaagacggcgatcacaacaagccggacgccaaactcaccgccgagatcgtggctcgcgcccgcgataaaggcctgattcttctctcctgcggcccgtattacaacgtgctgcgcatccttgtaccgctcaccattgaagacgctcagatccgtcagggtctggagatcatcagccagtgttttgatgaggcgaagcagtaacgccgctcctatgccggaggcgacgctgcgcgtcttgtccggcctacggggatccaggtcggataaggcgtttacgccgcatccgacaatctgtacgtgaacaggaagaaatctatgttggccgggtaaggcggagccgctctccggcaaaaagaatcaataacaattatacgcgtgacccggcgcgggaaatgtcggggcgctctcccaagtgacacactttcgagaggattcaggatggggcaaagtagccaaccacatgagttaggcggcgggctgaagagtcgccacgtcaccatgttgtctattgccggtgttatcggcgcaagtctgtttgtcggttccagcgtcgccatcgccgaagcgggcccggcggtattactggcctatctgttcgccgggctactggtggttatgattatgcggatgttggcggaaatggcggttgccacgcccgataccggtagcttttccacctatgccgataaagccattggtcgctgggcgggctataccatcggctggttgtactggtggttttgggtactggttatcccgctggaagccaacatcgccgccatgatcctgcacagttgggttccaggcattcccatctggttattttccctcgtcattaccctcgccttaactggcagtaacttattaagcgttaaaaactacggcgaatttgagttctggctggcgctgtgcaaagtcatcgctatcctggcctttattttccttggtgcagtcgcaattagcggtttttacccgtatgccgaagtgagcgggatcagtagattgtgggatagcggcggctttatgcccaacggtttcggtgcggtattaagcgcgatgttgatcaccatgttcagctttatgggcgcagaaattgtcaccattgccgccgcggaatccgacacgccggaaaaacatattgtccgcgccaccaacagcgttatctggcgtatttctatcttctatttatgttctatttttgtcgtcgtggcattaattccgtggaatatgcccggactaaaagccgtcggttcttatcgcagcgtactggaattgctcaatattccccatgcgaaattaatcatggactgcgtgatattactttccgtaaccagttgcctgaacagcgcgctgtataccgcgagtaggatgctctactccttaagtcgtcgcggtgatgctcccgcggtaatgggtaaaatcaaccgcagtaaaaccccgtacgtggcggtgttactctccaccggcgcggcattcttaacggtggtggtgaactattacgcgcctgcgaaggtatttaaatttctgatcgacagctccggcgctatcgccctgctggtttatttagtcatcgccgttagtcagttgcggatgcgcaaaattctgcgagcagaaggaagcgaaattcgcttgcgaatgtggctttatccgtggctcacctggctagtcatcggctttattacctttgtgttggtagtgatgctattccgtccggcgcaacagttagaagtgatctccaccggcttattagcgatagggattatctgtaccgtgccaattatggctcgctggaaaaagctggtattgtggcaaaaaacacccgttcataatacgcgctgatcatgatcaggagtcacaccatgaccattacgtctctggatggctatcgctggctgaagaacgatattattcgcggtaattttcaaccggatgaaaaattacgaatgagtttgctgacaagccgttatgcacttggcgttgggccgttacgggaagctcttagccaactggtggcggaacggctggtcacggtggtgaatcaaaaagggtatcgggtggcgtctatgagtgagcaggagctgctcgatattttcgacgcccgcgccaatatggaagcgatgttagtgagtctggcgattgcccgcggtggcgatgagtgggaggcagacgttctcgcaaaagcgcatctgctgagtaagcttgaggcctgtgacgccagcgagaaaatgcttgatgagtgggatctgcgtcatcaggcgtttcatacggcaattgtggcgggctgtggttctcactatttgctgcaaatgcgtgaacggttgtttgatctggcggcgcgttatcgatttatctggctgcggcgaacggtgcttagcgtggaaatgctggaggataaacacgatcagcaccagaccctgactgcggcggtactggcgcgagataccgcgcgcgccagtgagttaatgcgccagcatttactgacgccaattcccattatccagcaggcgatggctggcaattaattactcttccggaatacgcaacacttgccccggataaattttatccgggctttttagcatcggtttattcgcttcgaagattttattgtacagattagcgttaccgtagacctgtttggaaatggcactcagagtgtcgccagacttaacggtataaaactggctggcagtggctggtgtcgccgttttcacctgatcatcgacactggcaataccggaaatattccccaccgcaacaaggattttctccttcgcctcctgactcaggccgtcaccagtgaccgtcgctttgccgtcggcaatttgaatattcactttatcggcatccggtataccggttttgttcagatgctcctgcaccttcttcgcctgatcgtctttatcgtgctgacctgtaaccgcgtcccagagtttttctccggcatctttcacaaaattgaacagacccatagctacctcattcgttaacggaaacactcagaaagtgtagcagaggaacgcggcgcgttaacgccgcggggatgagcacaggtttaatcgcgggtttgcacccagaacgcgtgaatcaaaccggggatatacccaagcagtgtcaacagaatattaataatgaacgcccaaccgaaccctttaccgagcagcacgccgagcggcggcagaatgatggtgatgacgattctccagaaacccatatgtactccctataagaaaattactcattgtttaaaaagagattttatctcttaagcgtagtaattttagcggagcctgccagtttcagcttacgcttttactctcatttacgctgctgaggctggtatatgttgcatttttagtttagagtttacttaatttagaaaatacttaaataaatatgactgaactcgcgcaattacaggccagtgccgaacaggcagcggccttattgaaagcaatgagccaccctaaacgattgctgattctgtgcatgcttagcggttcccccggcaccagcgcgggagagctgacgcgcattaccggactgagtgcctctgcgacaagtcagcatctcgctcgtatgcgggacgaagggcttatcgacagccaacgggatgcccaacgcattctatattccattaaaaatgaggcggtaaatgccattatcgccaccctgaaaaatgtctattgtccgtaaggagtcactatggctttgacaaccattagcccgcatgatgcacaagaattaatcgcacgcggcgcaaagttaatcgatattcgtgatgctgatgaatatcttcgtgaacatattcctgaagcagatctggctccattatccgtgctggaacagagtggtcttccggctaaattacgtcacgagcaaattatattccactgccaggcaggtaaacgcaccagtaataatgccgataaattagcagcgattgccgcccccgcagaaatctttttactcgaagatgggattgatggctggaaaaaagcaggattgccagtagcggtaaataaatctcaacccttgccgttaatgcgccaggtgcagatcgctgcgggtggtttaatattaatcggcgttgtactgggttataccgtaaatagcggtttcttcttattaagtggctttgttggtgccgggttactgtttgcaggaatcagcggtttttgtggaatggcaaggttgttagataagatgccgtggaaccaacgagcttgagaagcgacgccggacgcgccctagcagcgacatccggcctcagtaattagatcaggaaatcgtcgagagatttaccttctgccagcgcctgagcaattggcttcggtgtacggccctgaccggtccaggttttagtttcaccgttaacatcggtgaatttatatttcgccggacgcggctggcgttttttaccagcgcgtggtgcagcagcagagctattacccaataactcttccgggttaattccgtcagctttcatcagctccagccaggtgctaattttttcctggcgctctgccagttcacgctgctgctgttcttcttcttcacgtctttctttagtgacaaccctgaatttttcgagcatttcttcaagaacgtcaatggagaattcgcgagccatcgcacggagggtgcgaatgttatttaaactttgtaacattacggacataataaagaaaaccttttaacgccaaaacaaaaaaagtatttcgtcgcgtagtgtaagcgatcacttattatatttccacaaaatttaatctatttacagtcctgcgcgagattatttcagctgttattttctgaaactctcagaataatttcaagattatatattagccattttgatgagtaatttagattattggtgaacagagcggcgctctctgctcgctaattccgcaagcctgacaaaatcaaagtgaataaaaatgcaatataacagaataaaagaaaacatccatcactggtgctttctgctgttaatgtacattgtctggcataaaaaatgctgaaaatgacccagctactacatacaccgaattctctacgcttatagcgttacctcacccccaaactttcattagtgatattaaaggtaaggccatatctaattgatttaattaaaaataaatcatatcggcatgtaaaaatccacaatgtacaaaaaacgagccgttacggaatattttatctacaaaaactgactaaataaaaatttttcactaattgattagtcatagccagcgatatacgctatgcgaaaatgcagatggcaatgagatccactgctttcatctccattaacatcccattacgcttttattaaggagcattagcatgttcagtccgcagagtcgcttgcgtcatgcagttgcagatacgttcgcgatggttgtttactgttctgtcgtgaacatgtgtattgaagttttcctctccggaatgagcttcgaacagtctttttattccagattggtagcgattccggtgaacatcttaattgcatggccatacggtatgtaccgtgatctgtttatgcgcgcggcacgcaaagttagcccgagcggctggataaaaaatctggcggatatcctggcttatgtgacgttccagagtccggtgtatgtggcgatcttgttagtggtgggcgcagactggcatcagattatggcggcggtcagtagtaacatcgttgttagcatgttgatgggggcggtttatggctacttcctcgattattgccgccgactgtttaaagtcagccgttaccagcaggtaaaagcctgactcttcttttcgcgactggcatcgccagtcgcgtctttaactggcttcgccaaataaaccattcaaataacgttcaagcgcaacacggctactaaagccatgcgggataccgtaatgctcgtgtcgctcgcctgctaaatagagcggaaattgctggtaatgatcgcaagttttaatatcggaagcgggttcagccagtgtgctactgcgttcttttaatgttggatgaattaccagagcggtacgtcccattcgcgcttcgcgattaacatagacataattttccccacggcggtaaccatacgctttctgggttaccacatcgacagtaaaaccgactttttcaagtacgcgcgccacctcgtctggtcgtaaatacatatttgatcctcgttattatcaaccgcgggcctaccttacctgattgcgcattcacaacgctttcagaaaagtccataaagccgcgatgaacctcagttaagaaaattatggtctacactgaaaattacatcgaattctaatgggggatcatatgtttaaccgaccgaaccgcaacgacgttgatgatggcgtgcaggatatccagaatgatgtcaatcaattagctgacagcctcgaatctgtattgaagtcctggggcagcgacgccaaaggggaagctgaagccgcacgcagtaaagctcaggcattgctgaaagaaaccagggcgcgaatgcatggtcgtactcgcgtccagcaagccgcgcgcgatgccgttggctgcgcggattcttttgttcgtgaaagaccctggtgtagcgtgggtacagcagctgcggtaggtatttttatcggcgcactgttaagcatgcgcaaaagctaatgcaaaaatgataataaatacgcgtctttgaccccgaagcctgtcttcggggtttctttttgcctggtgaatcacaaaaatccccctaccccgtcacgctcatatccagggtaatttcgaccactatttgctatatattgtgtggttgaatcttttttcaactacatctagtatctctgtatcaacagagagacaacccgacgcgtatcatcgcgccgtatcttcattttaaacggaaatacgaatcatgcgcattactatttacactcgtaacgattgcgttcagtgccacgccaccaaacgggcgatggaaaaccggggctttgattttgaaatgattaatgtcgatcgcgttcctgaagcggcagaagcgttgcgtgctcagggctttcgtcagttgccggtagtgattgctggcgatcttagctggtctggtttccgtccggacatgattaaccgtctgcatccagcgccacacgcggccagtgcatgagccagctcgtctacttctccagcagctccgaaaacacgcagcgttttatcgaacgtttaggtctgcccgcggtgcgcatcccgctcaatgagcgggaacggattcaggtagacgagccttacatcctgatcgtgccctcttacggcggcggcggtacggctggcgcggtgccacgacaggtaattcgctttttaaacgacgagcacaaccgggcgttgcttcgcggcgttattgcttctggtaatcgcaactttggtgaggcgtatggccgcgccggagatgtgattgcccggaaatgcggcgtgccgtggctgtaccgttttgaactcatgggtacgcaaagcgatatcgaaaacgttcgtaaaggagtaaccgaattttggcaacgacaaccgcagaatgcctgacgcaggaaacgatggattaccacgcgctgaatgcgatgcttaacctctacgatagcgcaggtcgcattcagttcgataaagaccgccaggccgttgacgcctttattgcgacgcatgtgcgtccgaacagtgtgaccttcagtagccagcagcagcgcctgaactggctggtcaacgaaggttactatgatgaaagcgttcttaatcgctactctcgcgactttgtcattacgctgtttacccacgcacacaccagcggttttcgtttccagacattcctcggggcatggaagttttacaccagctatacgttgaagacattcgacggtaaacgttatctggaagattttgccgatcgagtaacgatggtggcgctgacgctggcacaaggcgatgagacgctggcgttgcaactgaccgatgaaatgctgagtggacgctttcagccagccacgccaacattcctcaactgcggtaagcagcagcgcggcgaactggtttcctgttttttgctgcgtattgaagacaatatggagagcattggtcgggcggtaaattccgcactgcagctgagcaaacgcggcggcggcgtagcatttttgctgagcaatctgcgagaagcgggcgcgccaattaaacgtattgaaaatcaatcttctggcgtaattccggtgatgaaaatgctggaagacgcattttcctatgccaaccaactcggcgctcgtcagggggctggtgcagtctatttacatgctcatcatcccgatattctgcgttttctcgacacgaaacgggaaaatgccgacgaaaaaatccgcattaaaacactgagccttggcgtggtgatcccggatatcactttccatctggcaaaagagaatgcgcagatggcgctgtttagcccttatgacgtagagcgagtttatggcaagccgtttgccgatgtggccatcagccaacactatgacgaactggttgccgatgaacgcattcgcaaaaaatacctcaacgcccgtgatttcttccagcgactggcagaaatccagtttgagtccggctatccctacatcatgtatgaagacacggtaaaccgtgctaaccctatcgccgggcgcataaatatgagtaatctctgcagtgaaattttgcaggttaacagcgccagtgagtatgacgagaatctcgactatacccgcacaggccatgatatttcctgcaatttaggtagcttgaatattgcgcacaccatggattcccccgattttgcccgcacggtagagactgccgtgcgcggtttaacggcagtaagtgatatgagtcatatccgcagcgtgccgtccatcgaagccggaaatgccgccagccacgccatcggactggggcagatgaatttacacggctatctggcgcgagaaggcatcgcttatggtagcccggaagcactggatttcaccaatctctatttctatgccatcacctggcatgcactgcgtaccagcatgttgctggcacgcgaacgcggtgaaaccttcgccgggttcaaacagagtcgctatgccagtggtgaatattttagccaatatctgcaagggaactggcagccgaaaacggcgaaagttggcgaactgtttacccgtagcggtattacgttacctacccgtgagatgtgggcgcagctgcgcgacgacgtgatgcgctacggcatatacaaccagaatcttcaggcggtgccgccaaccggttctatctcttatatcaaccatgctacgagcagtattcatccgattgtggcgaaagtagagatacgcaaagagggcaaaacaggacgcgtttactaccctgccccgtttatgactaacgagaatctggcgctgtatcaggacgcttacgaaattggcgcagaaaagatcatcgacacctacgcggaagcgactcgccatgtcgatcaggggctgagcctgacgctttttttccccgataccgccaccactcgcgatatcaacaaagcgcagatttacgcctggcgcaagggtatcaaaacgctctattacatccgcctgcgtcagatggcgctggaaggcactgaaattgaaggctgcgtctcctgtgcactttaaggaatatctatgaaactcagtcgtatcagcgccatcaactggaacaagatatctgacgataaagatctggaggtgtggaatcgcctgaccagcaatttctggctaccagaaaaggtgccgctgagcaacgatattcctgcctggcagacattaactgtcgtagaacaacaactgacgatgcgcgtttttactggcctgacgctgctcgacacgctgcaaaatgttatcggcgcgccttctctgatgcccgatgcactcacgcctcatgaagaagcggtattaagcaatatcagctttatggaagcggttcatgcccgctcttacagtagcattttcagcacgctatgccagaccaaagatgtcgatgccgcctacgcctggagtgaagaaaacgcaccgttgcagcgaaaagctcagattattcagcaacattatcgcggtgatgatccgctgaaaaagaaaatcgccagtgtgtttcttgaatcttttttgttctattccggtttctggctgccgatgtatttttccagccgcggaaagctgaccaataccgcggacctgatccgtctgattatccgcgatgaagcagtccacggttactacataggctataaatatcagaaaaacatggaaaagatatctctgggacaacgtgaagagttgaagagtttcgccttcgatttgttgctggaactctacgacaacgagttgcaatacaccgatgagctgtacgccgaaaccccgtgggctgacgatgtgaaagcgtttctctgttacaacgccaataaggctttgatgaatctgggctacgaaccgttatttcccgcagaaatggcggaagtgaatccggcaatcctcgccgcgcttagcccgaatgccgatgaaaatcacgatttcttttccggtagtggctcctcttatgtgatggggaaagcggttgaaacagaagatgaagactggaatttctgagggtgttattttcaaaaatatcactacccgcagcagggaaataattcccgccaaatagctttttatcacgcaaataatttgtggtgatctacactgatactctgttgcattattcgcctgaaaccacaatattcaggcgttttttcgctatctttgacaaaaaatatcaactttctcgatttgctctcagcccttatatcacgggaaattccggcgatttgctcgcatcaatattcatgccacatttgccatcaggggttgcctcagattctcagtatgttagggtagaaaaaagtgactatttccattgggtaatatatcgacatagacaaataaaggaatctttctattgcatggcaattaaattagaaattaaaaatctttataaaatatttggcgagcatccacagcgagcgttcaaatatatcgaacaaggacttagtaaagaacaaattctggaaaaaactgggctaagccttggcgtaaaagacgccagtctggccattgaagaaggcgagatatttgtcatcatgggattatccggcagcggtaaatccacaatggtacgccttctcaatcgcctgattgaacccacccgcgggcaagtgctgattgatggtgtggatattgccaaaatatccgacgccgaactccgtgaggtgcgcagaaaaaagattgcgatggtcttccagtcctttgccttaatgccgcatatgaccgtgctggacaatactgcgttcggtatggaattggccggaattaatgccgaagaacgccgggaaaaagcccttgatgcactgcgtcaggtcgggctggaaaattatgcccacagctacccggatgaactctctggcgggatgcgtcaacgtgtgggattagcccgcgcgttagcgattaatccggatatattattaatggacgaagccttcagcgcgctcgatccattaattcgcaccgagatgcaggatgagctggtaaaattacaggcgaaacatcagcgcaccattgtctttatttcccacgatcttgatgaagccatgcgtattggcgaccgaattgccattatgcaaaatggtgaagtggtacaggtcggcacaccggatgaaattctcaataatccggcgaatgattatgtccgtaccttcttccgtggcgttgatattagtcaggtattcagtgcgaaagatattgcccgccggacaccgaatggcttaattcgtaaaacccctggcttcggcccacgtagcgcactgaaattattgcaggatgaagatcgcgaatatggctacgttatcgaacgcggtaataagtttgtcggcgcagtctccatcgatagccttaaaaccgcgttaacgcagcagcaaggtcttgatgcggcgctgattgatgcgccgttagcagtcgatgcacaaacgcctcttagcgagttgctctctcatgtcggacaggcaccctgtgcggtgcccgtggtcgacgaggaccaacagtatgtcggcatcattagcaaaggaatgctgctgcgcgctttagatcgtgagggggtaaataatggctgatcaaaataatccgtgggataccacgccagcggcggacagtgccgcgcaatccgcagacgcctggggtacaccgacgactgcaccgactgacggcggtggtgctgactggctgaccagtacgcctgcgccaaacgtcgagcattttaatattctcgatccgttccataaaacgctgatcccgctcgacagttgggtcactgaagggatcgactgggtcgttacccatttccgtcccgtcttccagggcgtgcgcgttccggttgattatatcctcaacggtttccagcaattgctgctgggtatgcccgcaccggtggcgattatcgttttcgctctcatcgcctggcagatttccggggtcggaatgggtgtggcgacgctggttagcctgattgccatcggcgcaatcggtgcctggagccaggcaatggtgactctggcgctggtgttaaccgccctgctgttctgtatcgtcatcggtttgccgttggggatatggctggcgagaagtccgcgagcggcgaaaattattcgtccactgcttgatgccatgcagaccacgccagcgtttgtttatctggtgccaatcgtcatgctatttggtatcggtaacgtgccgggcgtggtggtgacgatcatctttgctctgccgccgattatccgtctgaccattctggggattaaccaggttccggcggatctgattgaagccagccgcagtttcggtgccagcccgcgccagatgctgttcaaagttcagttaccgctggcgatgccgaccattatggcgggcgttaaccagacgctgatgctggccctttctatggtggtcatcgccagcatgattgccgtcggcgggttgggtcagatggtacttcgcggtatcggtcgtctggatatggggcttgccaccgttggcggcgtcgggattgtgatcctcgccattatcctcgatcgtctgacgcaggccgttgggcgcgacagtcgcagtcgcggcaaccgtcgctggtacaccactggccctgttggtctgctgacccgcccattcattaagtaactctgcacttgcccggtgacgccgggcattatcaccctgccaaaaaaaggaataacaatgcgacatagcgtactttttgcgacagcgtttgccacgcttatctctacacaaacttttgctgccgatctgccgggcaaaggcattactgttaatccagttcagagcaccatcactgaagaaaccttccagacgctgctggtcagtcgtgcgctggagaaattaggttataccgtcaacaaacccagcgaagtagattacaacgttggctacaccagccttgcttccggcgatgcaaccttcaccgccgtgaactggacgccactgcatgacaacatgtacgaagctgccggtggcgataagaaattttatcgtgaaggggtatttgttaacggcgcggcacagggttacctgatcgataagaaaaccgccgaccagtacaaaatcaccaacatcgcacaactgaaagatccgaagatcgccaaactgttcgataccaacggcgacggaaaagcggatttaaccggttgtaaccctggctggggctgcgaaggtgcgatcaaccaccagcttgccgcgtatgaactgaccaacaccgtgacgcataatcaggggaactacgcagcgatgatggccgacaccatcagtcgctacaaagagggcaaaccggtgttttattacacctggacgccgtactgggtgagtaacgaactgaagccgggcaaagatgtcgtctggttgcaggtgccgttctccgcactgccgggcgataaaaacgccgataccaaactgccgaatggtgcgaattatggcttcccggtcagcaccatgcatatcgttgccaacaaagcctgggccgagaaaaacccggcagcagcgaaactgtttgccattatgcagttgccagtggcagatattaacgcccagaacgccattatgcatgacggcaaagccagtgaaggcgatattcagggacacgttgatggttggatcaaagcccaccagcagcagttcgatggctgggtgaatgaggcgctggcagcgcagaagtaatttttattcgggcggataaggcgtttttgccgcatccgccgttctgtgcacaatgcctgatgcgacgctggcgcgtcttatcatgcctacaaaccacatcgcacatttcaacaatctatctttcatcccatattcatcaacatccgctattattgatttccagcttaatcatcacctgatgaacaaaaataatgactaaacctaatcatgagcttagcccggcgctgatcgtgctgatgtctatcgccaccggtctggcggtagccagtaactattacgcccagccattgctcgacaccatcgcgcgtaacttttccctttccgccagtagcgcaggctttattgttaccgccgcgcagttgggctatgccgcaggtctactgtttcttgttcccctcggtgatatgtttgaacgccgccgcctgattgtcagcatgaccttactggcggcatgttgattaccgccagcagtcagtcgctggcgatgatgatcctcggtacggcattaaccggtttattcagtgtcgtggcacaaattctggttccgctggcagcgacgctggctagtccggataaacgcggcaaagtggttggcactattatgagcggtctgctgttggggatcttgctggcacggacagttgccggattgctggcgaatctcggcggctggcgcaccgtcttttgggttgctagcgtgttaatggcactgatggcgctggcattatggcgtggtctgccacaaatgaaaagtgaaacccacctcaactacccacagttgttgggttccgttttcagtatgtttatcagcgataaaattctgcgtacccgcgcgttgctgggctgcctgacctttgccaatttcagcattctctggaccagtatggcctttttgcttgccgctccaccttttaactacagcgatggtgtcattggtctgtttggacttgcgggagctgccggagcgttgggcgctcgtccggcgggcggttttgccgataagggcaaaagccaccacaccacaactttcggtctgctgctgctattacttagttggctggcgatctggtttggtcacacttccgtactggcgttgattatcggaatcctggtgctggatctcaccgtgcagggcgtgcatatcactaaccagacggtaatttatcggatacatcctgatgcgcgcaatcgcctgaccgcaggttacatgactagctactttattggcggtgccgccggtagcctaattagtgccagtgcctggcaacatggcggttgggctggcgtttgtctggctggcgcgacgattgccctggttaacttactggtctggtggcgaggttttcatcgtcaggaagccgcaaattaagcaatcagcaaccgttttcgtggctttacacttataagggtgttaagaagcccatcagtctgataaggttaagatattcattcagtctatttataatattaacaatcgttaagcgtacactctatggaaagccctactccacagcctgctcctggtagcgcgaccttcatggaaggatgcaaagacagtttaccgattgttattagttatattccggtggcctttgcgttcggtctgaatgcgacccgtctgggattctctcctctcgaaagcgtttttttctcctgcatcatttatgcaggcgcgagccagttcgtcattaccgcgatgctggcagccgggagtagtttgtggattgctgcactgaccgtcatggcaatggatgttcgccatgtgttgtatggcccgagtctgcgtagccgtattattcagcgtctgcaaaaaagcaaaaccgccctgtgggcgtttggcctgacggatgaggtttttgccgccgcaaccgcaaaactggtacgcaataatcgccgctggagcgagaactggatgatcggcattgccttcagtagttggagtagctgggtatttggtacggtaataggggcattctccggcagcggcttgctgcaaggttatcccgccgttgaagctgcattaggttttatgcttccggcactctttatgagtttcctgctcgcctctttccagcgcaaacaatctctttgcgttaccgcagcgttagttggtgcccttgcaggcgtaacgctattttctattcccgtcgccattctggcaggcattgtctgtggctgcctcactgcgttaatccaggcattctggcaaggagcgcccgatgagctatgaggttctgctgcttgggttactagttggcgtggcgaattattgcttccgctatttgccgctgcgcctgcgtgtgggtaatgcccgcccaaccaaacgtggcgcggtaggtattttgctcgacaccattggcatcgccagcatatgcgctctgctggttgtctctaccgcaccagaagtgatgcacgatacacgccgtttcgtgcccacgctggtcggcttcgcggtactgggtgccagtttctataaaacacgcagcattatcatcccaacactgcttagtgcgctggcctatgggctcgcctggaaagtgatggcgattatataacccacaagaatcatttttctaaaacaatacatttactttatttgtcactgtcgttactatatcggctgaaattaatgaggtcatacccaaatggatagtagctttacgcccattgaacaaatgctaaaatttcgcgccagccgccacgaagattttccttatcaggagatccttctgactcgtctttgcatgcacatgcaaagcaagctgctggagaaccgcaataaaatgctgaaggctcaggggattaacgagacgttgtttatggcgttgattacgctggagtctcaggaaaaccacagtattcagccttctgaattaagttgtgctcttggaagttcccgtaccaacgcgacgcgtattgccgatgaactggaaaaacgcggttggatcgaacgtcgtgaaagcgataacgatcgccgctgcctgcatctgcaattaacggaaaaaggtcacgagtttttgcgcgaggttttaccaccgcagcataactgcctgcatcaactctggtccgcgctcagcacaacagaaaaagatcagctcgagcaaatcacccgcaaattgctctcccgtctcgaccagatggaacaagacggtgtggttctcgaagcgatgagctaacgcgtcatctcgctcaaaaatccagatttataaaagaaaaaatgactggccagcatcgcaacatgctggcctttttggcaagcaggtcggctcagccgatgagttaagaagatcgtggagaacaatatgagcgcaaatgcggagactcaaaccccgcagcaaccggtaaagaagagcggcaaacgtaagcgtctgctcctccttctcaccttgctctttataattattgccgtagcgatagggatttattggtttttggtactgcgtcacttcgaagaaaccgatgacgcatacgtggcagggaatcaaattcaaattatgtctcaggtgtctggcagcgtgacgaaagtctgggccgataacaccgattttgtaaaagaaggcgacgtgctggtcactctcgacccgacagatgctcgccaggcgtttgaaaaagccaaaactgcactggcttccagcgttcgccaaacccaccagctgatgattaacagcaagcagttgcaggcgaatattgaggtgcagaaaatcgccctcgcgaaagcacaaagcgactacaaccgccgtgtgccgctgggcaatgccaacctgattggtcgcgaagagctgcaacacgcccgcgacgccgtcaccagtgcccaggcgcaactggacgtcgcgattcaacaatacaatgccaatcaggcgatgattctggggactaaactggaagatcagccagccgtgcaacaggctgccaccgaagtacgtaacgcctggctggcgctggagcgtactcgtattatcagtccgatgaccggttatgtctcccgccgcgcggtacagcctggggcgcaaattagcccaacgacgccgctgatggcggtcgttccagccaccaatatgtgggtggatgccaactttaaagagacgcagattgccaatatgcgtatcggtcagccggtcactatcaccacggatatttacggcgatgatgtgaaatacaccggtaaagtggttggtctggatatgggcacaggtagcgcgttcagtctgcttccagcgcaaaatgcgaccggtaactggatcaaagtcgttcagcgtctgcctgtgcgtatcgaactggaccagaaacagctggagcaatatccgctgcgtatcggtttgtccacgctggtgagcgtcaataccactaaccgtgacggtcaggtactggcaaataaagtacgttccactccggtagcggtaagcaccgcgcgtgaaatcagcctggcacctgtcaataaactgatcgacgatatcgtaaaagctaacgctggctaatccagaggtgcgtgtgatgcaacagcaaaaaccgctggaaggcgcgcaactggtcattatgacgattgcgctgagtctggcgacattcatgcaggtgctggactccaccattgctaacgtggcgatccccactatcgccgggaatctgggcagtagcctcagccagggaacgtgggtaatcacttctttcggggtggcgaatgccatcagcatcccgcttaccggctggctggcaaagcgcgtcggggaagtgaaactgttcctttggtccaccatcgcctttgctattgcgagctgggcgtgtggtgtctccagcagcctgaatatgctgatcttcttccgcgtgattcaggggattgtcgccgggccgttgatcccgcttagccaaagtctattgctgaataactacccgccagccaaacgcagcatcgcgctggcgttgtggagcatgacggtgattgtcgcgccaatttgcggcccgatcctcggcggttatatcagcgataattaccactggggctggatattcttcatcaacgtgccgattggcgtggcggtggtgttgatgacactgcaaactctgcgcggacgtgaaacccgcaccgaacggcggcggattgatgccgtggggctggcactgctggttattggtatcggcagcctgcagattatgctcgaccgcggtaaagagctggactggtttagtagtcaggaaattatcatccttaccgtggtggcggtggtggctatctgcttcctgattgtctgggagctgaccgacgataacccgatagtcgatctgagcttgtttaagagccgcaacttcaccatcggctgcttgtgtatcagcctcgcgtatatgctctacttcggcgctattgttctgctgccgcagttgttgcaggaggtctacggttacacggcgacctgggcaggtttggcctctgcgccggtagggattattccggtgatcctgagcccgattatcggccgcttcgcgcataaactggatatgcggcggctggtaaccttcagctttattatgtatgccgtctgcttctactggcgtgcctatacctttgaaccaggtatggattttggcgcgagcgcctggccgcagtttatccaggggtttgcggtggcctgcttctttatgccgctgaccaccattacgctgtctggtttgccaccggaacgactggcggcggcaagcagcctctctaactttacgcgaacgctggcggggtctatcggcacgagcataaccacgaccatgtggaccaaccgcgagagcatgcaccatgcgcagttgactgagagcgtaaacccgttcaacccgaatgcccaggcgatgtacagtcaactggaagggcttgggatgacgcaacagcaggcaagtggctggattgcccagcagatcaccaatcaggggctgattatttccgccaatgagatcttctggatgagtgccgggatattcctcgtcctgctggggctggtgtggtttgctaaaccgccatttggcgcaggtggcggcggaggcggtgcgcactaagtacaactaagccagttcatttgaactggcttttttcaattaattgtgaagatagtttactgattagatgtgcagttcctgcaacttctctttcggcagtgccagttcttcgttgctgttgatgcgtacgtcacgttccagaatgctacgcgcaatatcctgcgcttcctgcaagctgtgcatctggtaagtgccacactggtagacgttcagttccgggatctgattctgatcctgcactttcagcacgtcttccattgccgttttccaggcatcagcaacacgctgctcatctggcgtaccaatcagactcatataaaaaccggtgcggcagcccattgggctgatatcgataatctctacaccattaccgttaagatggttacgcataaaaccagcaaacaggtgctccagggtatggatccctctttctggcatcacttctttgttcggcacgcagaagcgcagatcgaacacggtgattgcgtcgccatgcggggtgttcattgttttcgccacccgaactgcaggcgcttccatccgggtatgatcgactgtgaagctatctaacaacggcatttagccacctccggtaatttttttaaaaattttctgaactctttcttcccaggcgagtctgagtatatgaaagacgcgcatttgttatcatcatccctgaattcagagatgaaattttggccactcacgagtggcctttttcttttctgtcaggcgtgtttttccagccacaccgcaaacggttcggtatcagcggcttccatttcctgctgacggcgttcagacgcctcgcgctcggctacaaaatcctcttcgcgcagaatttccagcggctcttcacgcagcagattacggtaggcttctgcaaatgctttgcctgttccgccaataccagtatcaatcatagaccttaagatacgggcagagaaagtcagatcgggattatcgaagcaggcaaccagttcatcacacactttctgatacgcttcgccgccgttaatactatccagcgtttgcgcgacgcgtttcagatcgcggaacagatctttacccacctgcggtaacgggaactgtgcggtttcgcagccgatacccagcgtcagacccggtttgcgaccttcgaggatcacccggttccagttaacgcgtgtacaggcaagttcgctactgctcatttccggtgcatcagccagcgcacaccagaccataaacaggtcgaggaatcgcacctgctgttcatctacaccaatcgggctgaacgggttgatgtccaggctacgcacttcaatatattcaatgccgccacgtaacagcgcatcagaagggctctcgccgctgcgggtaacgcgttttggacgaatcggcgcgtacagttcgttttcaatctgcaacacgttgctgttgatttgcagcctcttaccgtctttctcaataccaatcttcgcgtactcttcgcttggcgttttgattgcctgtttaaggcccgctacgtactcgtaaagatcgttgaaggtaataccaagattgctttggcttttattggtatagccgagatcgctcaaacgaagagaggtcgcatacggcaggtaatacataccgcactcggttttctcaaacggcaggctcgttggttttccttgcaggaaagaagaacaaatcgccggagatgcaccaaacagataaggaatgacccaaccgaaacgatagtaattgcggataacgcggaaatagcccgcagaaattttctctttggcatcagcgccgctgatatcaccgcacttcgcttgccagaatgccattggcaaagagaaattgtagtgcacgccggaaatggtttgcatcagcgcgccgtagcgatttttcagcccttcacgatacagcgttttaaagcgtccggtgttagaagtgccgtactgtgccagttcgatgtcctgaccttctgcgatgtagcatggcatacttaacggccacatccgctcatcgcccatattgcgcgccgtataacgatgcagatcgcgcataaaggtcagcatatgttcaatatcaccatccactggtgtaatgaattccagcaatgcttccgcaaaatcggtagtaatccatttgtgcgtcagtgcggaacctaatgcttcaggatgacctgttgttgccagtgtgccatcagcattaacacgcaaagtttcgcgctccagcccacgctgtatcccctttaacgcctgaggatgtttttccagccaggccagcgcctgacttacgtccgggatcaaattgacctcccgcctgtcaaaatcgttttaattagcataactgtaatggtgaccatatgtgcaggcctacaattagtgccaccacatcatgccctgaacggtcgctgctgcaactgcaacatagcgtaacgctttaccaaggcacaaaaaaaagattaccggtccccagctgatgcgcatccatcccgctaacagacacagtaaatcgccaaccacgggcatccagcttaataatagcgtgactgcaccatagcgtttcagccagccggtagctttctcttgccagcggcttgttttacgcaatggaaagaaacgcccaaggataacgttagttaaccctccaaggctattacccattgttgctgttaaaactaaaacccagggatgactgatcccggaaagcaacattgccaccagcacgacttcggagttgccgggtaatagtgtagcgctgagaaaactactggcaaacaagctgaaaaggcttaacgcttcactcacagcaagcgaacatccacggcgtccatgcctgctgcacgggccgcctgaataccgaaatcggcatcttcaaagaccacacactgcgtcggttgcacgcccatacgctgcgcgcacaacaaaaatgtgtctggcgcgggtttatggtgtttgacgtgatcggcagcgacgacggcgtcaaaataatggcgtaatcccaggtgcgccagcaatgcctcagcgatggcgctttcactccccgttcctacagccattgggcgacgaccatgccaacttttcaccacatcaacaagaggaagcggttcgacgctatccagcagcatacttcttactgcttctgttttttcacgcgctaacgcatgcgggtcgagatcggcctgattcagctcaataattgcctgagcaatacgccaggtggggcttccattaagcgcaatcatcgcctgaatatcgtactgaagaccgtagtgccctaatacttcgcgccacgctttacggtgcgtaggctccgtatccaggattgtgccatccatatcaaaaattaaacctgcataacgctcgtacatggtcttctcgcaagtcgaaaaatatgacgctactttagcgtaattgcttgattttgtcgctgatggcgaaggagaagaaaattcaggaaatggataaaggagttatttagaaatgagatatttttgaaggaaattttttggagaagatggtgcatccgggaggatgactcactgacgttcgcccttcgggccgttgctggcgcaacgttatccttcctggtgcctgcggttaataccgctatctcttcgataccttcattgctgaaggttacggagaatatggtgcatccgggaggattcgaacctccgaccgctcggttcgtagccgagtactctatccagctgagctacggatgcatcgggaaaacttattctactgctgatattgataccgctactaaagccatatcaattaagagatggtgcatccgggaggattactcgccttgcggctcgcccttcgggccgttgctaaagcaacgttatcatccctagtgcctgcggttaattccgctacctcttcgataccttcattgctgaagatttcggagaatatggtgcatccgggaggattcgaacctccgaccgctcggttcgtagccgagtactctatccagctgagctacggatgcatcgggaaatttattttactgctgatattgataccgctactaaagccatatcaagtaagagatggtgcatccgggaggattcgaacctccgaccgctcggttcgtagccgagtactctatccagctgagctacggatgcatcgggaaacttactttactgcagattttttgataccgctactaaagccgtatcaagtaagagatggtgcatccgggaggattactcgccttgcggctcgcccttcgggccgttgctaaagcaacgttatcctccctggtgcctgcggttattaccgccacctcttccataccttcatcgctgaaagtacgtagaatatggtgcatccgggaggattcgaacctccgaccgctcggttcgtagccgagtactctatccagctgagctacggatgcaaatggcggtgaggcggggattcgaaccccggatgcagcttttgaccgcatactcccttagcaggggagcgccttcagcctctcggccacctcaccacacgcctcttacgagtgcttcgaagaacttgtttatcgctcatcgtcgctgcgtggcgcacatattactttctgagacttataagtcaaacaatttttcctacacttttatcgtttgcacacttcacgttcaattagtctgtaaaaacgtcaaaaagagtgttttatcaacagaagaatggaggtctgacagatagtagtaatgcaaaaaaatggagacttaagttgaatgaacgggagtaaagcgaaaagactatagagtgaaggagaaattttgagggtgcgtctcaccgataaagatgagacgcggaaagattagtaactggactgctgggatttttcagcctggatacgctggtagatctcttcacggtgaacagaaacttccttcggggcatttacgccaatacgtacctggttgccctttacccctaaaactgtcacggtgacctcatccccaatcatgagggtctcaccaactcgacgagtcagaatcagcattctttgctccttgaaagattaaaagagtcgggtctctctgtatcccggcattatccatcatataacgccaaaaagtaagcaatgacaaacacattacatctaagcagtcatggcattacattctgttaaacctaagtttagccgatatacacaacttcaacctgactttatcgttgtcgatagcgttaatgcgaatgccgtgaagcgagtccacggcattgcctgacgcttatattattgcaatttcgcgctgacccagcctttcacactggctaacgctgcaggtaaggccgcagcatccgtaccaccggcttgcgccatgtcaggacgtccaccacccttgccgcccacctgctgagcgaccataccaatcagttcccctgctttcacacgatctgtgacgtccttagatacgcctgcaatcagagaaaccttaccttcgactaccgttgccagcacgataattgtgctccccagctgattttttaaatcgtcaaccatggtacgcaacattttcggctcaacaccgctaagctcgctaaccaacagcttaacaccattaacatcaattgccttactggaaagatttgcgctctcctgtgcggcagcttgttctttaagctgttgtaactctttttccagctgacgcgtacgttccagtacactgcgcactttatcagccagattattgctatcgcctttcagcagatgcgcgacttcgcttaagcgatcgctgtctgcatgaacggtggcgatagcaccttctccggttaccgcttcgatacgacgaacgcctgcagcagtaccgctttcagagatgatgcggaacagaccaatatcaccagtgcggctggcgtgagtaccgccacacaactcggtagagaaatcgcccatgctcagcacgcgtacgcgctcatcatacttctcgccgaacagcgccatcgcacctttcgctttcgccgcttcgagatccatgatgttggtttcgatcggcaaattgcgacgaatctgtgtgttcaccaggtcttcgaccgcacgaatctcttctggtttcatcgcttcgttgtgactgaagtcgaagcgcagcaccttgtcgttaaccagactacctttctggcttacatgagtacccagaacctggcgcagcgcagcgtgcatcaggtgcgttgcggagtgattcagacgaatacgggcgcgacgagcctcatcaacatcagcctgcaccgcgtcgcccactttcagagaacccgcagcaagtttaccgatgtgaccaatcgcctggccgtatttctgcgtatcttccaccgcaaaggagaagttagcgcctttcagttcgcctttatcgccaacctgaccgccggattccgcatagaatggcgtttgatccagcacgaccacagcttcctggcctgcattgatggcatcaaccgctttaccatcaacaaacagcgcagtcactttgccgttcagttccagatggtcatagcctttaaattcagatgcactgtcaacacggatcattgcgttgtaatcggcaccaaagccgctggcttcgcgcgcgcgacgacgctgctcttccattgcagcttcaaaaccagcttcgtcaactttgatgttgcgctcacgacaaacatcagccgtcaggtcaaccgggaagccataggtgtcgtacagacggaaagcagtttcaccatccagcgtatcaccagaaagttttgccagctcttcatccagcaacgccagaccgcgctccagagtacgagcaaactgctcttcttcagtcttcagcacctgctcaacctgcgcctgctggcgtttcaggtcttcacccgcagagcccataacgtcgatcagcggaccaaccagtttgtagaagaaggtttctttcgcgccgagcatattaccgtgacgcactgcgcgacgaatgatacgacgcagtacataaccacggttttcattggacggcattacgccatccgcgatcaggaacgcacaagaacgaatgtggtcagcgattacgcgcaggcttttattgctcagatcggttgcgccagtgactttcgctaccgcctggatcagcgtgcggaacaggtcgatgtcatagttagagttaacgtgttgcagcaccgcagcaatacgctccagacccataccggtatctacagacggcttcggcagcggttccatcgtgccatcggcctggcggttgaactgcatgaagacgatgttccagatctcaatgtagcggtcgccgtcttcttccgggcttcccggagggcccccccaaatgtggtcgccgtgatcgtagaagatttcggtgcacgggccgcacggaccagtgtcacccatctgccagaagttgtcagatgcgtatggcgcacctttgttatcgccgatgcgaataatacgttcgcgcgggatccctacttctttttcccagatttcgtaggcttcgtcgtcgctttcatagacggtaacccacagacgctctttcggcagggcaaaccatttttcgctggtcagcagttcccatgcaaactgaatggcatcgtgtttgaaatagtcgccgaagctgaagttgcccagcatttcgaagaaggtatggtgacgcgcggtgtaaccgacgttttccaggtcgttgtgtttaccacccgcacgcacgcagcgttgggaagtggtagcgcgggaataattacgcttgtcgagcccaaggaacacatccttgaactggttcatcccggcgttggtaaacaacaaagttgggtcgttatggggtaccagggagctgctggcaactacctgatgtcccttactatggaaaaagtcgagaaacgcctgacggatctcagcggtgctcttgctcataattatcctgaaatcaagctaacgaaatatcgccaccagctccagcgtgtcttaaccgccgggctggtaactgaaaagtgggaataagataagttttcttgactgggaagtaaaataccgtatgcgttcagtcggcaaaatttcgccaaatctcctggatatcttccatcagatagccacgatagagcagaaaacgctggatcttaactttttcactaaagacagttggcaaaggttcgccatattttcgcgtcgcctgatcgcgcgccagtgcgcaccagtcgatgtcacattcacgcatcgctttttctgtcgcttcgcgggaaatacctttctgattcagttcctggcgaatacgcgcaggtccataacctttgcggctacggctggcgataaagcgcgcaacaaatcggctgtcatcgagatagccatgttcatggcaccaggcaataacgcgctcgtaatcttctgccgtagcatcaatctcttctgggccatttttgcccataatcggtgccgcgagtttacgtcgcagttcttgctcactgtgatcgcgcaccgccagaatgcgtaccgcacgatccaacaggcgagcatatgccgggcgacgggatgtactttctgtcatggcatatccttacaacttaaaaaagcaaaagggccgcagatgcgacccttgtgtatcaaacaagacgattaaaaatcttcgttagtttctgctacgccttcgctatcatctacagagaaatccggcgtactgttcgggttgctcagcagcaactcacgtactttcttctcgatctctttcgcggtttccgggttatctttcagccaggcagtcgcattcgctttaccctgaccgatcttctcacctttgtagctgtaccacgcgcctgctttctcgatcagcttctcttttacgcccaggtcaaccagttcgccgtagaagttgataccttcgccgtagaggatctggaattcagcctgtttaaacggcgcagcgattttgttcttcaccactttcacgcgggtttcgctacccaccacgttttcgccctctttcaccgcgccgatacgacggatgtcgagacgaacagaggcgtagaatttcagcgcgttaccaccggtagtggtttccgggttaccgaacatcacaccaattttcatacggatctggttgatgaagatcagcagcgtgttggactgcttcaggttacccgccagcttacgcatcgcctggctcatcatacgtgccgcaaggcccatgtgagagtcgccgatttcgccttcgatttccgctttcggcgtcagtgccgccacggagtcaacgacgataacgtctactgcgccagaacgcgccagggcgtcacagatttccagtgcctgctcgccggtgtccggctgggagcacagcaggttgtcgatatcgacgcccagtttacgtgcgtagattgggtccagcgcgtgttcagcatcgataaacgcacaggttttaccttcacgctgcgctgcggcgatcacctgcagcgtcagcgtggttttaccggaagattccggtccgtagatttcgacgatacggcccatcggcagaccacctgccccaagcgcgatatccagactaaggctaccggtagagatggtttccacatccatggaacggtcttcacccaggcgcatgatggagcctttaccaaattgtttctcaatctggcccagtgctgccgccaacgctttctgtttgttttcgtcgatagccatttttactcctgtcatgccgggtaataccggatagtcaatatgttctgttgaagcaattatactgtatgctcatacagtatcaagtgttttgtagaaattgttgccacaaggtctgcaatgcatacgcagtagcctgacgacgcaccgcatcacggtcgccgctgaagcattcccgccgggtaatgccttcaccgcgggcagtggcaaaagcaaaccagacggtgccgacaggcttctcttcactgccgccatccggcccggcgataccactaatagacacggcataatcagcacgagccgctttcagtgcgcctatcgccatttccaccacgacgggttcactcaccgcgccatgctgcgccagcgtctcttcgcgtacgccgatcatctgcgctttggcttcgttactgtaggtgacaaatccgcgttcaaaccaggcggagctaccggcaatatcggtaatcactttcgctacccaaccaccggtacaagactcggcagttgttacggttgcgccacgggctttcagcgcctgcccaacctgttcacttaactgcatcagttcactgtcagtcatcacaacctctgtcagtcaaaaatttatgccggacaagatagcactttcgtcaggaagatggtgttggcgttgcaattttacgaggaggattcagaaaaaagctgattagccagagggaagctcacgcccccctcttgtaaatagttactgtactcgcgccagcgccacggcttgtcctaactgccagaccgccattgcgtaatgggtgctgtggttgtaacgggtgatggtgtagaagttcggcagaccgtaccagtactggtagccggtgccaacatccagacgcagcaggctggcttgttgatggttgcccagcggctgctgtggcgttaaacctgcggcggcaagctggctaatgctgtacttagttttgaagccatttggcaagcctggagcctgaccgtttgccattaccgcgacctgatcgcctttcacccagccgtgcgctttgaaatagttcgccacgctaccgatcgcatcaaccggatcccacaggttgatatgcccgtcgccgctgaaatctaccgcatattgtttgtaagagctcggcataaactgtccgtagcccatcgccccggcaaaggaacctttcagattgagcggatcgtcctgctcgtcgcgcgccatcaacaggaaggtttccagctcgccagagaaatactccgcgcggcgtgggtagttaaaactcagcgttgccagcgcatcgaggatgcgagttttccccatcacgcgcccccagcgggtttcaacgccgataatcccgacgataatttccggcggtactccatacacctgccacgcgcgattcaacgcatcttcatactgattccagaaaaccacaccgttctgcacgttgtccggcgtaataaattttttgcgataacggagccatgcgccgttcggaccacttggcggtttcacgcttgtggttggtgcctggttatccatcagccgcagtacgctatccagacgcttcgcctgggagagaatttcctgcaactgctgacgatcgaaaccgtgtttgttcaccattttgtcgatgaactgctgggcattcgggttattagcgaaatcgccgcccatctgcatcacattgtgctgcggctcaagcaggaagccgccagacggcgttccggtggtcgtatcagtctcagtaggttttggcttgctgctacaggcggcaagcaacacaaaaaggggaagcaatgttacataacgacgcttgaacatgaggggtccatttaacagattcaaccaggggcaagtatggtaaagcatcacgccccgcacaaggaagcggtagtcactgcccgatacggactttacataactcaactcattcccctcgctatccttttattcaaactttcaaattaaaatatttatctttcattttgcgatcaaaataacacttttaaatctttcaatctgattagattaggttgccgtttggtaataaaacaataaatcctgaaggagagaacaatgatagaaaccattactcatggtgcagagtggtttatcgggctgttccaaaagggcggagaggtgtttaccgggatggtgaccggcattcttccgctgttgattagcctgctggttatcatgaacgcactgattaattttatcggtcagcatcgtattgaacgttttgctcaacgttgcgccggtaaccctgtttcccgttacctactgttaccgtgcattggcacgtttgtcttttgcaatccgatgaccctaagcctgggtcgctttatgccggaaaagtacaaacccagctactacgcggcggcctcttatagctgccacagtatgaatggcctcttcccccatatcaaccctggcgaactgtttgtttatcttggcattgccagcggtctgacaacgctgaacctgccacttggcccactggcggtgagttatctgctggttggtctggtcaccaatttcttccgcggctgggtgaccgatctgaccaccgccatttttgagaaaaagatgggcattcaacttgaacaaaaagttcacctggcaggagcaacaagttgaaataacacctggcaggagcaacatcatgacgcatattcggatcgaaaaaggaacgggtggctggggcggcccgcttgagctgaaagccacgccgggaaaaaaaatcgtctatatcaccgccggtacccggcctgcgattgttgacaaactggcacagcttactggctggcaggctattgacggatttaaagaaggtgaacccgcggaggtggaaattggtgtcgcggtaatcgactgtggcggcacattacgctgcggcatctatccgaaacgacgtattcccaccattaatatccacagcacgggcaagtccggtccgctggcgcagtacattgtggaagatatttatgtctctggcgtaaaagaagaaaacatcactgtagtaggtgatgcgacaccacaaccctcttccgtgggccgtgactatgacaccagtaagaaaatcaccgaacaaagcgatggtttactggcgaaggtgggaatgggcatggggtccaccgttgcggtgctgtttcaatctggtcgtgacaccatcgacactgtattaaaaaccattctgccgtttatggcattcgtcagcgcgctcattggcatcattatggcttctggccttggtgactggattgcccacggtcttgctccgctggcgagccatccactgggtctggtcatgctggcgctcatctgttccttcccactgcttagtcctttcctcggcccaggcgcagttatcgcacaggttatcggcgtattgattggcgtgcagattggtctcggcaatattccgccgcatctggctttaccggcactgtttgccatcaacgcgcaggcggcctgcgacttcatcccggtcggtttgagcctggcggaagcccgtcaggacacggttcgcgtcggtgtcccttctgtactggtgagccgctttttaaccggcgcgccgactgtactgatcgcctggtttgtctccggttttatctatcaataaaggctgaaacatgaccgttatttatcagaccaccatcacccgtatcggcgcgagtgccattgacgccctcagtgaccagatgctcatcacctttcgtgaaggcgcgcctgcggacctcgaagagtattgcttcattcattgccacggcgagttgaaaggtgcactccatcccggtttgcaatttagtctcgggcagcatcgctatccggtgaccgctgttggcagcgtggcggaagacaaccttcgcgaactgggtcatgtcaccctgcgcttcgatggtttaaacgaagcggaatttccgggcactgtccatgtggcaggccctgtccccgacgatatcgcgccgggaagcgttttgaagtttgaatctgttaaggagtaaaaaatgaatcaggttgccgttgtcatcggtggtgggcaaaccttaggcgcgttcctgtgccacggtctggctgccgaggggtatcgcgtcgcggttgtcgatattcagagcgacaaagccgcaaatgtggcacaagaaattaacgccgaatatggtgaaagtatggcgtacggttttggtgctgacgccactagcgagcaaagcgttctggcgctctctcgtggggtagatgaaatctttggtcgcgtggatttgctggtctacagcgccggaatagcaaaagcagcctttatcagcgacttccagctcggcgattttgaccgtagcctacaggtgaatctggtgggttatttcctgtgtgcgcgtgaatttagccgtttgatgatccgcgacgggattcaggggcgcattattcagatcaacagcaaatccggcaaagtgggcagcaaacacaactctggctacagcgcagcgaaatttggtggcgtcgggctgactcaaagtctggcgctggatctggcggagtacggcattacggtgcatagtctgatgctcggtaacctgctgaaaagcccgatgttccagagtctgttgccacaatacgcgaccaagctgggtatcaaaccggatcaagtcgagcagtattacatcgacaaagtaccgctcaaacgcggctgcgattatcaagatgtgctgaatatgctgctgttctacgccagtcctaaggcgagctactgcaccggacagagcatcaatgtcaccggcggtcaggtgatgttctgatcaacagcggagatccattaaggatctccgtgagactatagaatgcctgatgcgctacgctcatcaggcatacaggacttccgccactacattaaggaaaagttatggtatccgcactcatcaccgtcgccgttatcgcctggtgtgcgcaactggccttaggcggctggcaaatttctcgttttaaccgtgccttcgacacactatgccagcaagggcgggttggcgtgggccgttccagcgggcgctttaaaccgcgggtcgtggtcgccatcgcgctggacgatcagcagcgcatcgtcgacaccttgtttatgaaaggactgaccgtcttcgcccgaccgcaaaaaattcccgcaattaccggtatgcatgcgggtgatttacagcccgatgtgatctttccccatgatccactaagtcagaatgctctaagtttggcgcttaaactgaaacgtggataatttcgttgtgaatgttacttgcttgcgaagttatcattttgaaacctaaatcaggtaatcacgcccatgaaacctcgtcagcgtcaggccgccattctggagtatctgcaaaagcagggtaaatgcagcgttgaagaattggcgcaatactttgacaccacaggcacaaccattcgcaaagatctggtcattctggaacatgccggaaccgtcattcgtacttatggcggagtggtgttgaataaagaggaatccgatccgcctatcgatcataaaacactcatcaacacccacaagaaagagctgattgcagaagctgccgttagttttatccatgatggcgatagcatcattcttgatgctggcagtaccgttttgcagatggttcccctgctcagccgctttaataacatcacggtgatgaccaacagcctgcatatcgtcaatgcgctatccgaactggataacgaacaaactatcctgatgccaggcggaacgtttcgcaaaaaaagcgccagttttcacgggcaactggcagagaatgccttcgagcatttcaccttcgataaattgtttatgggcaccgacggcatcgatctcaatgcgggcgtaaccacctttaacgaggtttataccgtcagtaaggcaatgtgcaatgccgcgcgcgaagtgattttgatggcggacagtagtaagtttggccgtaaaagccccaacgtagtttgcagtcttgaaagcgtcgataagctgattaccgacgcaggtatcgatccggcgtttcgtcaggcgctggaagagaaagggatcgatgtgatcataaccggagagagcaatgagtgaagcactactgaacgcgggacgtcagacgttaatgctggagttgcaggaagcaagccgtttaccggaacgtctgggcgatgattttgttcgcgccgccaatatcatcctgcactgtgaaggcaaagtggtggttagcggaattggcaaaagcggccacattggtaagaaaatcgccgcaacgcttgccagtaccggcactccggctttttttgtccatccggcagaagcgctgcacggcgatctggggatgatcgaaagccgcgatgtgatgctgtttatctcttactccggtggcgcgaaggaactggatctgattattccgcgtctggaagataaatctatcgcgctgctggcgatgaccggcaaaccgacgagtccgctgggcctggcggcaaaagcggtgctggatatctccgtagaacgcgaagcctgcccgatgcaccttgcgccgacctccagcaccgtcaataccctgatgatgggtgacgcgctggcgatggcggtcatgcaggcgcgcggatttaatgaagaagattttgcccgctcccacccagccggggcactgggcgctcgcttgctgaataaagtgcatcatctgatgcgccgtgacgatgccatcccacaggtggcgttaaccgccagcgtgatggatgcgatgctggaactcagccgcaccggtctggggctggtggcggtatgtgacgctcaacaacaggtacaaggcgtctttaccgacggcgatttacgtcgctggctggttggcggcggcgcactcaccacgccagtcaatgaagcgatgacggtcggcggcaccacgttgcaaagccaaagtcgcgccatcgacgccaaagagatcctgatgaagcgcaaaatcactgccgcaccggtggtggatgaaaacggcaaactcaccggcgcaataaacctgcaggatttctatcaggccgggattatttaatccttcaatcccagacgtttcgccagccgatgcaggttggcgacgtcggtttccagcatccgcgcgcaggcagcccagttgtgatgattttgtgccagtgcctgacgaatagtttcacgctggaacgcttctgtcgcttcacgcaggttttgcttaacaacgggcaccgccgccacttctggcgtcggcaacgtcacctcaggaaaagcaaaatgttgcgcctcaagaatcacttcatcgccgctgcgggtggctctcgccagaactaccgcccgatgaatagcatgttccagttcgcgcacgtttcccggaaaactgtagtgttgcagtaaatttcgcgctccggcacttaataccacgcgggagagcccctgccgcaaacgacactgctcgcagaaataccccgccagcagaatgacatcatcgccccgctcacgcagcggcggcacgctaagtggaaacacgctcaggcgatgaaacaaatcggcgcggaatcgccctgccagcacctcttcgcgtaaatcgcggttagtcgccgccagcacgcgcacatcgacccgcaaacaacggtcatcgccaacgcgctgaatatcgccatactgcaacaccctcagcagcttggcctgcaatgccaagctcaactcgccgatctcatccagaaacagcgtgccgttatccgccatttcaaacttcccgctgcgattactgatagcgccagtaaacgctcctttcacatgcccgaacaactcactttccgccacactttccggcagtgcagcacagttgagatagaccagcggattcaccgcccgtgggctggcttcatgaatcgctttcgccaccagctccttaccggttccagtctcaccgctgatcaggacgttgagatcggacgccgccacaatctcaatctcttttttcagttgcgtcatgccaggggacaagccaatcatctgcgtctgtttcaccgcttcaaacggcgtggcatcgcctggcagcatattctggctttccagttgttcaatcagcaacgcattgcttaacgctcccgccgccagcgcagcaatcagccgtagctcttcgtcgctgaaaacatcgaactgatcgggctgcatcccgtcgagcgtcagtgcgccgatcaggttttgcccggcaaacaatggcagaccaacgcaggcgtgaaccttcagactctcctgcccaggaatcaaaccgtcatagggatcgggcaattcgctgtctgcgggaaagcgcaccacatccccggcgcgggcaatcgcttccagccgtggatgcccttccagcgcaaagcgtctaccgagtacatcctttgccagaccgtcgatggcaagcggaataaactgccggctatcgtaacgtagcaacgcagacgcatcgcactccagcacctgacgtagcgtggtgatcaggcgctgaaaacgatcctggtgaccaatcccacgctgcaattcgatggcgatattcgccagcacatcaacggaaaaactcatctttgcctcactgtcaatttgactatagatattgtcatatcgaccatttgattgatagtcattttgactactcattaatgggcataattttatttatagagtaaaaacaatcagataaaaaactggcacgcaatctgcaattagcaagacatctttttagaacacgctgaataaattgaggttgctatgtctattgtggtgaaaaataacattcattgggttggtcaacgtgactgggaagtgcgtgattttcacggcacggaatataaaacgctgcgcggcagcagctacaatagctacctcatccgcgaagaaaaaaacgtgctgatcgacaccgtcgaccataaattcagccgcgaatttgtgcagaacctgcgtaatgaaatcgatctggcggatatcgattacatcgtgattaaccatgcagaagaggaccacgctggggcgctgaccgaactgatggcacaaattcccgatacgccgatctactgtacagccaacgctatcgacagcataaatggtcatcaccatcatccggagtggaattttaatgtggtgaaaactggcgacacgctggatatcggcaacggcaaacagctcatttttgtcgaaacaccaatgctgcactggccggacagcatgatgacttacctgacaggcgacgcggtgctgttcagtaacgatgctttcggtcaacactactgcgacgagcatctgttcaacgatgaagtggatcagacggagcttttcgagcagtgccagcgttactacgccaatatcctgacgccgttcagccgcctggtaacaccgaaaattaccgagatcctgggctttaacttaccagtcgatatgatagccacttcccacggcgtggtatggcgcgataacccgacgcaaattgtcgagctgtacctgaaatgggcggctgattatcaggaagacagaatcaccattttctacgacaccatgagcaataacacccgcatgatggctgacgctatcgcccaggggattgcggaaaccgacccacgcgtggcggtgaaaattttcaacgtcgcccgaagcgataaaaacgaaatcctgactaatgtcttccgcagtaaaggcgtgctggtcggcactagcacgatgaataacgtgatgatgccgaaaatcgccgggctggtggaggagatgactggtttacgcttccgtaacaaacgcgccagtgctttcggctctcacggctggagcggcggtgcggtggatcgtctttccacgcgcctgcaggatgcgggtttcgaaatgagccttagcctgaaagcgaaatggcgaccagaccaggacgctctgaagttatgccgtgaacacggtcgcgaaatcgcccgtcagtgggcgctcgcgccgctgccgcagagcacggtgaatacggtagttaaagaagaaacctctgccaccacgacggctgacctcggcccacggatgcagtgcagcgtctgccagtggatttacgatccggcaaaaggcgagccaatgcaggacgttgcgccaggaacgccgtggagtgaagtcccggataacttcctctgcccggaatgctccctcggcaaagacgtctttgaagaactggcaagcgaggcaaaatgagtaacggcattgtgatcatcggtagcggcttcgccgcccgccaactggtgaaaaatattcgcaaacaggacgccactattccattaaccctgattgccgccgacagcatggatgagtacaacaaacctgacctcagccatgttatcagtcaggggcaacgtgccgatgaccttacccgccagacggcgggtgaatttgccgagcagtttaatctgcacctgtttccacaaacctgggtgacggatatcgatgccgaagcccgtgtggtgaaaagccagaataatcagtggcaatacgacaagctagtactggcaaccggtgccagtgcctttgtcccgcctgtgcctgggcgtgagttaatgctgacgttaaatagtcagcaagagtatcgcgcctgtgaaacgcaactgcgggatgcccgacgcgtgttgattgttggcggtggtttgattggtagcgaactggcgatggatttttgtcgtgcaggcaaagcggtcacgctaatcgacaacgctgccagtattctggcgagcttaatgccaccggaagtaagcagccgcttgcagcatcggttgacggagatgggcgttcatctgctgttgaaatctcagttacaggggctggaaaaaacggattctggcattcaggcaacgctggaccgccagcgcaatatcgaagtggatgcggtaattgccgccaccggactgcgcccggaaaccgccctggcacgacgcgccgggctgacgattaatcgcggcgtttgcgtcgatagttatctgcaaaccagtaataccgatatttacgcgctgggcgattgcgcggaaattaacggtcaggtattgccgttcctccagccgattcaacttagcgcgatggtgctggcaaaaaatcttctcggcaataacacgccgctgaaactcccggcgatgctggtgaaaatcaaaacgccggaattaccgctgcatctggcaggcgaaacccagcgtcaggatttacgctggcaaattaataccgaacgccagggaatggtggcgcgcggcgttgacgatgctgaccagcttcgcgcctttgtggtcagtgaggatcggatgaaagaggcatttggattgttgaaaacattgccgatgtaagtgggctactgtgcctaaaatgtcggatgcgacgctggcgcgtcttatccgacctacggggacgcatgtgtaggccggataaggcgtttacgccgcatccggcaatggtgtccaaatgcaacacgttttatccgttctggacttcacccgctaaccaacgcgccgcagcaataaccccctgccccagagacaaaccgccatcacccgccggtaaactctgtggaaagagcaatgtgaaatcagcgagataatgcgccagacgtgcacgcagcaaacggttatgaataaccccgccgctaaataccagcgtagtgataccacgcatcgtggcctgctcacgcatcaacgcggcaaaaccctgcgccagcgtatcatgaaacgcccacgcgcgttgattaaccggtgcctgccagttcagccactgctgccagaaagtggcgagatccagttgattgtccacccgcggcattgtcaccggatgcgtcactccgtggcaactggctgcgagcgcctccagagcacaagccgcttcaccttcataacttaacgtggctggcgcacagcccagtgccgccgccactgcatcgaaaaaacgcccacagctactcgccagcggcgcgttaattccacgctcaatggcccgcgccagcacgctccagttttgctgttgcacacttgctgtttcagagtaattctgccactccggcacaaagcgcaggcactgcgccagcaggtttcgccacggctgcttcgctgccaaatcgccacccggaagcgccactgcaggcaagccgcccaggtgctcacattcgcgatagttcacccgcaggcactcgccgccccacaaagcgccgttctcccccataccgataccgtcgagcgtcaaagcaatgacatcaccgccatccagcggccactgatgctctgccagacacgccgctgcatgggcatgatgatgcagtaccgtttgcgtcggcagattcatttcacgcgcccactggctggagacatagcccggatgcgcgtcatgcacaacgtattgcggggtaaaatcgtagatgttttgcatcaggcgtaacgcttcgcgccactgcatctggatgccatcgtcacttaaatcgcccagatgctgactcaacaccgcttgttcaccgcgcaccaggcagaaggtatttttcagatccgcgccgagacacagcacaggcggaacatttttaaagcccggaggcaaagccagcgcatccggcacatacccccggctacggcgcagcatttcgccgctttcgcgcaccacgctatcatccatccgctgcacgatgtcgcggttatgtatcaagaatccgtcggcaatgccctgcaaatccgccagcgcctgttcgttgctgatagctggtggtttaccgctcaggttgccggaggtcatcaccagcgggcattgcagttcctgtaacagcaaatgctggagcgggttcgcaggcaacattaccccgacttcgttaaggtcaggggcgatatcatcacaaagctcaggaacgtattttttatccaccagcacaatcggcgcggcgggcgtggtaagcaactggcgcgcagcgtctggtaaaccgtcagccactggcaacatgaccgccagcggtttcgccgggcgatgtttgcgcgcccgaagtgtcgccaccgcgttactgttacgtgcatcgcaggcaagatgaaatccgccaatccctttgatggcgacaattttgcccatttttaactgtgcgatagctgcctgtaatgccgcctcttgttccgcatgttcaccatgacttacccattcaagatgcgggccacactccgggcaggccaccggctgggcgtggaagcgacgatcgagcgggtcacggtactctttgtcacaggccggacatagcggaaacgccgccatcacggtaaacgggcggtcgtaaggcatggcgcgaataatggtgaaacgcgggccgcagtgggtacagttgataaacggataacgataacgccgttcgcctggggtattcatttcggcaaggcaagcagggcaagtagcggcatcgggaacaatttgcgtattcatggtgccgcctgtgctctggcgtatagtgaactcggtgggcagttgactccagataaacggctcacgctcgacgctatcaatacgcgccagcggcgggcagtgctgatacaattgaacaagaaacgtttccgggtcttcccgcagccggacttctacgccatcgccgtcattacagacatcgccgtgaagatttaattgctgtgccagctgccagacaaacggacgaaaaccgacgccctgcactttgccacgaatacgcagttggacaccgcaagatgtgttttttgccattgagttattcccgccatcatgaattgcgtaacccgccctgccggacacgacagcgtcgcatccggcagtcacaggtcggcgataccgcccgctccgtattctacgaatatttccgggaattcctttgatgccagaacagttctgtaagatttttagaacatcagcgccgtacggcggcgtttttctgcgctcagttgttcaagtttattacgatcgacacaaatcagcgcatgagtcgggcaagccgccatacacgccgggccgtcttcacgatggttgcacaggtcgcatttattggcttcggctttgtcagcccgtacattcagacccgcgccgctgttgcggatcaccggacgtaccaccacttccatcgcaccatacgggcaagccacaacgcaggttttgcaaccaatgcaacgttcctgcatcacatgaacaaaccctttatcacggctgatagcaccattcgggcagacgttagcgcacggtgcatcttcacactgacggcaaactgtcgccgtggaaatgttcacacctttaatgacatggatacgcggtaaaaaagtttccggggtcaggcttgcacagtcctgattttcctgatgagaaaccacgcacgctacttcacaggtacggcaaccaatacatttactcgcgtcagcaatgatgaaacggttcatcaaattctccagcaatgacagttaatgcgccgatacattcacaaatcatgccagtttttaatttactgttatttaaggaaattaatttctgtaatgcaggaaaaacgatgtcatcgacactagtgacgatgacatgtgatgacaatgtttatcggctaggagcaatgagactgtcgcggcggatcagttttccgctgaaggttttcggcggactgaaatccccgccatcgagcataaaaatcagccgtccaataatttcctgaatcatctcagtcaccggaatttttacgctggagagcgccggaacggtgtagggggcaatagcgatatcatcgaatccgataacactcacctgctctggcaccgctacgccgcgctcgtgtaacgctttcatcgcacctatcgccatatcgtcgttactggcaactaacgcgctaaatttagccccacgttcgagcaacatttctaccccttcggccccgctggcaggcgtccatttaccgttagcgataagtttttcattgagcgcaataccatgctgcgccagcgcgtctttatacccggcaagacgttcaatgttggtgggggaatccatgctgccggtaaggaaagcaatctcctgatgcccggcgtttatcaactctgccacggcgttaaaactggtctgtttatgatcgcaccagacgctatggctgctgtttttgcgcaggcggcgattaagcaccattatcggctgactgtgcgcgtcaatgatgtcatcgatctcatccacgcttaaaaaacgcgggtaaatcatgatcgcgtcgcagcgcagatccagcagatactgaatcgcctggcgctcttcttctgcgctgtgtttaccatctgccaatagcaactgccgccctttctcttccgccattcgcgcggcatgaaagagtaattcactaaaataaatgccgtggtaaagcgtgttggtcactaccagccccagcgtctgagtactcttcgcgctcagattgcgcgccagcaagtttggacggtaaccgctctcttctaccgcctgaaacacgcgatctttagtctcctggctgacgtagccattaccactaagcacgcgggaaacggtcgctttactaaccccggcgcgcttcgccacttccagcatcgtcgtcatcattttcatccctttacacgcaatcaacgcagtgtactgcaccgtttgccgattgtccttgcacaatcggcgggaaaaatattcaggtgaccggtttcacaaatataaaaaatgaacaattcactctcttgcttatttagtgacaactattcatgattttgtgaaaccggtttcttaattccgtttcagcatcggcatttttccgtcacgtcgactgataacaactacatctaccctactgataacaggataaaatccgatggccaaaaattatgcggcgctggcacgcagcgtgatagcggcactgggcggcgttgataacatcagcgcggtcacgcactgtatgacgcggttgcgctttgttatcaaagatgatgcacttatcgacagcccgacgttaaaaaccatccccggcgtgctcggcgtggtacgtagtgacaaccagtgtcaggtgattatcggcaataccgttagtcaagcctttcaggaagtcgtcagcctgctgccgggagatatgcagcccgcacagcccgtgggtaaacccaaactcacgctacgtcgcattggtgcggggatcctcgatgcgctgatcggcaccatgagtccgctgatcccggcgattatcggcggaagcatggtcaaactgctggcaatgatcctcgagatgagcggcgtgctgacaaaaggaagcccgaccttaaccattctgaatgtgattggtgacggtgctttcttcttcctgccgctgatggtcgcggcatctgccgccatcaaatttaaaaccaatatgagcctggcgattgccatcgcgggtgtgctggtacatccgagttttattgaactgatggcgaaagcggcccagggtgaacatgtcgaatttgccctgattccggtcaccgcggtgaaatacacctacacggtgatcccggcgctggtgatgacctggtgcctgagttatatcgaacgctgggtggacagcattacaccggcggtgaccaaaaacttcctcaaaccaatgctgattgtgttgattgccgcaccgctggcaatcctgctgattggcccgattggtatctggatcggtagcgccattagcgcgctggtttacaccattcatggttatctgggctggcttagtgtcgccattatgggcgcgctgtggcctctgctggtaatgaccgggatgcaccgcgtctttacgccaaccatcattcagaccattgccgaaaccggcaaagaagggatggtcatgccgagtgagatcggcgctaacctgagcctgggcggtagtagtctggcagtggcgtggaaaacgaaaaacccggaactgcgtcagacggcgctggctgcggcggcaagtgccattatggcggggatttccgaaccggcgttatatggcgtggcgatccgcctgaaacgtccgcttatcgccagtcttatcagcggttttatttgcggcgcggttgccggtatggcggggcttgccagccacagtatggcagcgccggggctatttaccagcgtgcagttcttcgatccggcgaatccaatgagcatcgtctgggtgttcgcggtcatggcgctggcggtggtgctgagctttatcctcacactgttgctcggctttgaggatattcctgttgaggaagcggctgcccaggcgcgaaagtatcagagcgtacaaccgaccgtcgccaaagaagtaagtcttaattgaggatgaaaatgagtgtatttccagaaagttttttatggggcggcgcgcttgccgccaaccagtctgaaggtgcgttccgtgaaggtgacaaaggtctgaccactgtcgatatgatcccacacggcgagcatcgaatggcggtgaaactggggctggaaaaacgttttcagttgcgagatgacgagttttatcccagccatgaggcgacggatttttatcatcgttataaagaagatatcgccctgatggcagagatgggattcaaggttttccgtaccagtattgcctggagccgtctctttccgcagggcgatgaaatcacgcccaatcagcagggcattgctttttatcgttctgtctttgaagagtgtaaaaagtacggtatcgaaccgctggtcacgttgtgccacttcgatgtgccgatgcatctggtcaccgaatatggctcctggcgtaaccgcaagctggtggagtttttcagccgctacgccagaacctgctttgaagcatttgatggtctggtgaaatactggctaaccttcaatgaaatcaacattatgttgcatagcccgttctccggcgcgggtctggtgtttgaagaaggtgaaaatcaggatcaggtgaaatatcaggccgcgcatcaccagctggttgccagtgcgctagccaccaaaatcgcccatgaggttaacccgcaaaatcaggtgggctgtatgctggcgggcggtaacttctacccttacagttgcaagccggaagatgtctgggcggcgctggagaaagaccgggaaaacctgttttttatcgatgtgcaggcgcggggcacgtatccggcttactctgcccgcgtattccgcgaaaaaggggtaaccatcaacaaagcaccgggcgatgatgaaatcctgaaaaacaccgtcgattttgtctctttcagctattacgccagccgctgcgccagcgcggagatgaacgccaacaacagcagtgcggcgaacgtggtgaaaagcctgcgtaatccgtatctacaggtgagcgactggggctggggaattgatccactcggtctgcgtatcaccatgaatatgatgtacgatcgttatcagaagccgctgtttctggtggaaaacggcctgggcgcaaaagatgaatttgctgccaatggcgagattaacgacgactatcgcatcagctacttacgcgaacatatccgcgcaatgggcgaagcgattgcagacggcattccgctgatgggctacaccacatggggctgtattgatttagtttccgcctctacgggtgaaatgagcaaacgctacggctttgtctttgttgaccgtgacgacgcaggcaacggtacgctgacgcgcacgcgtaagaaaagtttctggtggtataaaaaagtgattgccagtaatggggaagatttagagtaagtaacagtgccggatgcggcgtgaacgccttatccggcctacatgtcgcacgaaccatgaaggcccgataagcgcagcgcatcgggcaatttagcatttggcatcagagctggttcaccccatcaagaacatccctgtcctgattccttaatgaaaaattactcttcttccaccgctaactgcgcgaagccgccatttccttcccagccttccagtcgttgataaacggtttctaccgcatctttaatcggctgggtcatcgggtagtaaaagccgacgatatccggctgaatgccgaggaaaatcacttcgccaatatcttctttcaactggtcgataaggtaattcaacggcatgttatgggtagtcatcataaacatctcggcgatatcatccgggtcgatgatgcggatctcgccggggtttagccccatatccgtggcgtcgacaatcagcagtcgtgtcgggcgcagttcacggatagcgacgatgtcgttttccggtgcgctaccgccgtcaatcaccacccagttacctttcggcgcggcggcgcacttttccgccagcagcggacctgcgccatcatcgcccatcatgctattgccaacacagagtaaaacgtcagtcacgcagtctcctcaccatcaaatagatggcgttttcctgatgaatatcatgcagcatacttaacagcattgtactccattcctgctgctggctagtttgcgctgcccgggctttatcgaatgcgttggccagcatcggcacatggttaatgtcgatgacgatctcaccatatttcggcacgccttccattttgcggcgggcttcactgcctgcctccagagtggcaatccatgccagatattcatcccacgggcaggtgagcgccgcttccaggcaatcgataaccccaaggtggtgaccaatcgccaggctgtaatagaccacctgctgcgcctcggcgggcgtggcatcgttctcatcaataaatttatggctcagttgactgaacaccaccttttcactcatcggatacgcgcctcttcaacaacatgattcagatggctgacaatctcgttcagacgcggatcgttttccgcttccagccagcgtgcaacctgttcttcgccctgccctaactgtgtaaggtaatcatcggcaatctgacgaccgtaacgataacccgccaggcgacgtgcttcgcgatccactttcacgcgcagcggctgcaccatatcaccatgcaggatctccgccggttgttcatccagttcacccggcccacgggcgtgaattttctgctccagcaggccgagcgccattgcaaagccgtacagcgtggcggcaggcgttggcgggcagccagggatataaacatccacagggacaattttatccgtaccgccccacacgcagtagagatcgtggaagatcccgccactgttaccgcaggcaccgtaggagatacaaattttcgggtccggcgcggactgccacgcacgcagcgcaggggatcgcattgcacgggtgaccgcgccggtaaacagtaaaatatccgcatgacgcggactaggaacgactttaatgccgaagcgttctgcatcaaacagcgggctaagcgtggcgaaaatttcgatttcgcaaccgttgcagccgccgcagtccacgcggtaaacataggcagaacgtttgatttttttcagtaagctcgccttcatgctggcgatggattcatccaccgtcatggggaccggaatgccgttggcgtcacgggggcctaataaattgctcatcagatggcctctttcatatggcgagtcagttcaatacggtcggacggcaccaggcatttctggcgcttacattccgggcaagtctcaaagctttcgcggtggttttccgcgcggctgtcgccgttgtgcttaagcagcgcaatggcgtagtcgatctctttctggacggcgaaaggacgattgcagacgcggcagttgcacagcgcgaagcgggactgttgcaggaagtcttctttcttccacaccgccagttcgtactcttggctcagtttgatcgccgccgtcgggcagacttcttcgcagcgtccacagaagatgcagtgcccaagattaaactcccaggcaagctctcctgtggcgaggtcagtttcaaccgttaaggcgttactcgggcaggcattgacgcaggccgcgcagccgatgcactgctgcgggttctgctctggcttaccacggaagtttttatcaaccgcaatcggctccagcggataagagctggtcgccgtgccggttttgatgacttttttgataaaggtaaacatggcgattccttatttcagcgggctgtttttacgctcaatgctgtaacgctcgagttctttgtacggcaccactttgctcttcttcttacgcacatcgaccacggtcatgcggtcggtacaggagtagcaagggtcgaggctaccgataatcagcggcgcatcggaaacggtgttgccgcgcagcatgtagcgcagggtcggccagttcgcgtaggtcgcggcacggcagcgccagcggtacagcttctggttgtcgccggtcatgctccagtggatatcatcgccgcgcggcgcttcggcaaagcccagcgcaaagcggtgcggaatgtaggtaaagccttccaccatcagtgggccacccggcaggttatccagaccgtagtcgatcatgttcagcgcggtatagacttcgttgatacgcactttcagacgggaaataacgtcgcagccctgctcgctgtggacttccattggcagcaggccatagccgacaaacgggtgatcggcgcgggtatcacgggcgtgaccgctggcacggaccatcgggccgacgttactgaagtcgcgagcgatttccgggtccagacgaccaatgccgacagtgcgctgttccatgttcggagtgctcagcagcacatccaccagctcctgcacttcacgacgcatctgttgtgccagctggcgggtctggatcatgtcgtctttcagcagatcgcgacgaatcccgccgatcaagttcaggccgtaggttttacgcgcaccggtaaggatctctgccattttcatggaggtttcacgcacgcggaagaactgcataaagccggagtcgaagccggtaaagtgacaggccaggccaaggttgagcagatggctgtgcaagcgttctacctccagcagaatggcgcggatcatctgcgcacgttctggcacctgaatacccatcgcgttttccacgctcgtggtgtaggcggtgctgtgggcaaagccgcagatcccgcacacacggtcagagaggaaggtcacttcgttataacccatacgggtttccgccagtttttccatgccgcgatggacgtagaacagacggtagtcggcgtcgataatgttttcgccatcgacgaacagacggaagtggcccggttcatcagaagtgacgtgcagcggaccaatcggcacgacgttgtttttcttgtcgcccagttcgttgatgaactcgtaggtttcagcatcggtggtcggtgccggacgctgacgataatccatgctgtctttacgcagcggataaagttcatccggccagtcatccggcagcaccagacgacgttcatccggcagaccaaccggaatcaaaccgtacatatcgcgcacttcacgctcgccccacaccgccgccggaacgcgcggcgtcacggacggatattccggtttgttggcgtcaacttcgacgcgaaccgtaatccaacacttagtgcccttctccatgctcagcacgtagtaaacggcgtaatgaccattcagtttgcgttcgtcgttaccaaacagcacgctcagccagccaccctgtttgtagtaaagaaactccaccacttccggcaggtagttcacctttacggtgacagtcagctgatctttggtctgccaggcgtggtccagcacgacgcccggaaatgcctcattcagcgcggcgagataatgttgacctaatttttcttcagacatgctcaaactctctttaatcacgccgccagcaaggagacgaacgctaaaaatgcaaagccaaacccagcccaggtaatgcgcggagtaatatcaagacgcagacgggccatgctgttttcgaacagcgcgataaccaggacgccgaccaccagttttacgatggcaatcaccagcgccagcagcagtccaccggcggtgaaggtttccatttgtccccacggaataaacaccccgacgaacatctgcaacaccaccagctgtttcaggctgataccccatttcatgacgccaaagccgctgccgctgtattcagagagcgggccttcctgcagctcctgctcggcttccgccaggtcgaacggcagtttgcccatttcgataaaggtggcgaacgcacaggcacaaagcgccagtaccagcgggatgctctggctcagcggccagtgataaacggtgtcggtgatgttgctgatgttggtggaaccggcaacctgtgcggcaacccacagaccaagcagcagcatcggttcgaccagcacgccaagcatcgcttcacggctcgcgccgatagcggtaaacgggctaccggtatccagaccagaaatggcaaagaagaaacgcgcgatggcaaagagatacagtaaggtgatcaaatcacccagttgcggcagcggagaaccgacggtcaccaccggcagcgcagtagcgatagtcagcatgacgcccaccatcacatacggcgtcaggcggaacacccagccggaggcatccgggccgacgctctgacgccccagcagtttgataatgtcgcgatactcctgcaacacgcccggcccgcgacggttatgcaagcgggcgcgcgccacgcgggttataccggagagcagcggcgcaacggcaaataacaccagcgcctgaattaacggatataaaacactcattctcaggctcctcgactaacaataatcaccaccagtaccgccagttcaaccagcgccatccggcggaacagcaacgcactcccctcgcactgccagcccggcaccagagacaccggattcagccatttgcgtagtttcagcaccggcgcaaacgcctgtttcaccggcatggcaaaaccgtgagcggtaatcaccatacttttttcgtggtcgtaaccgcacacccaggccgcaccgcgggaacggcttggcaaacgatcgcctttgcaaatcgccataatgatgaatggcagcagcgggcaggcaatcagcagcaacgtgatcatcggttgagaaacggtggtgttagcaggctccagcggcagaggtacagcagcagagagcatcggcagtagccacggcgcagcaacaccgccaattacgcagcaaatcgccagtgccactacgcttacgctcatcaggagcggcgcacaggtggcgttttcggcttctttggtgcgcggcgcgccgaggaacgtgacgccatagactttcgccatacacatcaccgccagcgcaccggtaattgccagccccacagcgagcagcggccccagcagacgggcaacaaacgcgccactattgctcagtttgaaaaaactttgatagataacccattccccggcaaaaccattcagcggcggcagcgcagccattgccatcagcccgactaacatggcgatggagataaccggcattttcttgccaataccaccgagtttttcgatatcgcgatgaccggtacggaaccagacgctccccgccccgaggaacagtacgcttttgaacaggctatggttaagcagatggtacagaccaccgaccaggccaagagcaatcagcgccggttgttcgagcgcgatacccgttacgccagcgcccagccccagcaggatgatgccgatattttccagggtgtggtaagccagcaggcgctggatgttgtgctccaccagcgcatacagaccaccgacaaacgcggtgatcatgccgagcaccagcagcgcgatcccccaccacagcggtgcattaccgcccagcagactcagggttaaaatgcccagcaggccaattttcatgactaccgtagaaaacaacgcggcagctggcgcagaggcgttcgcatgtgcctgcggcacccagccgtgcagcggaataatcccggccagcaggccaaagccaatcactccgagcagccagatatcggaaccgagcggcagctgttgcatacgcatatccagcaggcgcagatccagcgtgccgtaacgctgccacagcagccagcaagcaatcgccagcagcagagtgccaagacgccccagcgcaaaccacagtttgccctctttgctgttgctggtgaggaacaccgcgcacagggccatgatttcggccattaccacgaacatgccgaggttgctggcaatgacggcgcagacggcggcagccatcaacatattgatctgcaagccgttgcacttcacctgcgcgtggcgatgccagtcaatgttgtagaggctgacaaacagaccgcacagaccgagcgtaatcagccaaatcgcgttaagcggagagatttgcacatcgtagcttaccaggctcagcgcaccgctcacgccaaccgcgccagtcagtacagtgaagcccgcggctgccgtatacagactaccaaccgcgccgccaattccagctatccagccacttaacgctttttgaaaagaaaagagaaatgccagaacagcggcggcgacaaaccacgccacgccgctattgatcagggaaattgcgctcatttagcctctccactttgagcctgctgaaacaaggtgagatcgccaaagtccgtgttaaaggtcagctcacgcttacgtttgctgacgcgggcgatatcggtgttatccaccagatgcagggctttagtcgggcacatccgcacgcaggccggaccttgttcatcaaagctacaaaggtcacatttgacggcgatcgcgcgaatacctggcacccagtcaagcaatgtgctgacacgcgccggagcaggcggtgccggtggcgctttcggggtattggcgtttgccggaatatccagcggacggctgccggaaaattcaattgcgccaaacgggcaggcgatgccgcacagcttgcagcttacgcacaggctttcattcaactgcacggccccatcgacgcgggtgatggcgttaaccgggcagaccaccgcgcagggtgcatcttcacagtggtgacagagctgcggcgcagattctttttcattcagcatcactctcaggcgcggcatactttgcaggccgtgctggcgatgcgtctcactacaggcggcctcacaagtgtggcagccgatacagagcgtggagtcagcaattacaaaacgattcaccaggcattcctcaggtgattgtcatttttgacgaaaacatgccgatgaaatgtcattttcgacactcatcgacacgcccatccccaaacaggcgtaacgcctgcaaaacgggcaaagcctcagctcatgctgccgggctttgtccctttaccagttggcttaaattcaccggcacattgttttcaatagcggtgtataagctgtcgtaaacgccagcgattttttcgagatagtgttccagaacctgttcgcgatcgcggatgttgaccttgccatcaatcatgccgtcaatgctcagttgcgcctgcgcaatccgctgtttgtcttcgccatcttttgtttcgacgtaatactcgatggtgtggctgttaaagccatccgccagggtgacgtaaatgcgaaaatgttcaaaaaggacgaaacagagttctttgtccggcgcgcagctcatggcgtgatgcaggcgcgctttgcttaacgtgatcccctgaaccaggctattgcagtagatgtgccactggtcctgtaggcgacgatgccgctgtgcgatgtaatcggctttctcgcttatttcccaaatagtcattgtcaggttacccgtttaacagagatgccagctttaagcattttttgtgccaacttttaatttattgttattaaagagatttttaagctaaagatgaatttcgtcgccgtgtcgacgtgtcatttcgacatcatcgacattattcaccgcagggataatcaacactggcacaattattgcttgtagctggcaatagttaatgggaggcgatatgcacgaaataaccctctgccaacgggcactggaattgatcgaacagcaggccgcaaaacacggcgcaaaacgcgtaactggggtctggctcaaaattggcgcattttcttgtgtcgaaaccagctctcttgccttttgttttgatctggtttgccgcggcagcgtggcggaaggttgtaaactgcacctcgaagaacaagaggccgaatgctggtgtgaaacatgccaacagtatgtgacgctactgacccagcgcgtccgccgctgtccacagtgtcatggtgacatgctgcagattgtggcagacgacggtttacagattcggcggatagaaatagaccaggagtgagcgatgtgtacaacatgcggttgcggtgaaggcaacctgtatatcgagggtgatgaacataaccctcattccgcgtttcgtagcgcgccatttgccccggcggcacgcccgaagatgaaaatcaccggcattaaagcgcctgaatttacccccagccagactgaagaaggcgacctgcattacggtcatggcgaagcgggcactcacgcaccgggcatgagccagcgtcggatgctggaagtcgaaattgacgtgctggacaaaaataaccgtctggctgaacgcaaccgcgcgcgctttgctgcccgcaagcaactggtgctcaacctggtttccagccctggttccggtaaaaccaccctgctgacggaaaccctaatgcgcctgaaagacagcgttccgtgcgcagttattgaaggcgaccagcaaaccgtgaacgatgccgcacgcattcgcgctaccggcacaccagcgattcaggtgaacaccggtaaaggctgccatcttgacgcacagatgattgccgacgccgcaccgcgtctgccactggacgataacggtattctgtttatcgaaaacgttggcaacctcgtatgcccggccagcttcgatctcggtgaaaaacacaaagtggcggtgctttccgttaccgaaggtgaagacaaaccactgaaatatccgcatatgtttgccgccgccagcctgatgctgctcaacaaagttgacctgttgccgtatctcaactttgacgttgaaaagtgcatcgcctgcgcccgcgaagtcaatccagaaattgaaatcatccttatttccgccaccagcggcgaagggatggaccagtggctgaactggctggagacacagcgatgtgcataaggtaaaactggctggagacacagcgatgtgcataggcgttcccggccagatccgcaccattgacggcaaccaggcgaaagtcgacgtctgcggcattcagcgcgatgtcgatttaacgttagtcggcagctgcgatgaaaacggtcagccgcgcgtgggccagtgggtactggtacacgttggctttgccatgagcgtaattaatgaagccgaagcacgcgacactctcgacgccttacaaaacatgtttgacgttgagccggatgtcggcgcgctgttgtatggcgaggaaaaataatgcgttttgttgatgaatatcgcgcgccggaacaggtgatgcagttaattgagcatctgcgcgaacgtgctagtcatctctcttacaccgccgaacgccctctgcggattatggaagtgtgtggcggtcatacccacgctatctttaaattcggcctcgaccagttactgccggaaaacgttgagtttatccacggtccggggtgcccggtgtgcgtactgccgatgggtagaatcgacacctgcgtggagattgccagccatccggaagtcatcttctgtacctttggcgacgccatgcgcgtgccggggaaacagggaagcctgttgcaggcaaaagcacgcggtgccgatgtgcgcatcgtttacagcccgatggatgcgttgaaactggcgcaggagaatccaacccgcaaagtggtgttcttcggcttaggttttgaaaccactatgccgaccaccgctatcactctgcaacaggcgaaagcgcgtgatgtgcagaatttttacttcttctgccagcacattacgcttatcccgacgttgcgcagtttgctggaacagccggataacggtatcgatgcgttcctcgcgccgggtcacgtcagtatggttatcggcaccgacgcctataattttatcgccagcgattttcatcgtccgctggtggttgctggattcgaaccccttgatctactacaaggcgtggtcatgctggtgcagcagaaaatagcggcccacagcaaggtagagaatcagtatcgtcgagtggtaccggatgccggtaacctgctggcgcaacaggcgattgccgatgtgttctgtgtcaacggcgacagcgaatggcgcggcttaggcgtgattgaatcttctggcgtgcacctgacgccggattatcaacgattcgatgccgaagcacatttccgcccggcaccgcagcaggtctgcgatgacccgcgcgcgcgttgtggtgaggtattaacgggcaaatgtaagccgcatcaatgcccgctgtttggtaacacctgtaatcctcaaaccgcgtttggtgcgctgatggtttcctccgaaggagcgtgcgccgcgtggtatcagtatcgtcagcaggagagtgaagcgtgaataatatccaactcgcccacggtagcggcggccaggcgatgcagcaattaatcaacagcctgtttatggaagcctttgccaacccgtggctggcagagcaggaagatcaggcacgtcttgatctggcgcagctggtagcggaaggcgaccgtctggcgttctccaccgacagttacgttattgacccgctgttcttccctggcggtaatatcggcaagctggcgatttgcggcacagccaatgacgttgcggtcagtggcgctattccgcgctatctctcctgtggctttatcctcgaagaaggattgccgatggagacactgaaagccgtagtgaccagcatggcagaaaccgcccgcgcggcaggcattgccatcgttactggcgatactaaagtggtgcagcgcggcgcggtagataaactgtttatcaacaccgctggcatgggcgcaattccggcgaatattcactggggcgcacagacgctaaccgcaggcgatgtattgctggtgagcggtacactcggcgaccacggggcgactatccttaacctgcgtgagcagctggggctggatggcgaactggtcagcgactgcgcggtgctgacgccgcttattcagacgctgcgtgacattcccggcgtgaaagcgctgcgtgatgccacccgtggtggtgtaaacgcggtggttcatgagttcgcggcagcctgcggttgtggtattgaacttagtgaagcggcactgcctgttaaacctgccgtgcgtggcgtttgcgaattgctgggactggacgccctgaactttgccaacgaaggcaaactagtaatagctgttgaacgcaacgcggcagagcaagtgctggcagcgttacattcccatccactggggaaagacgcggcgctgattggtgaagtggtggaacgtaaaggtgttcgtcttgccggtctgtatggcgtgaaacgaaccctcgatttaccacacgccgaaccgcttccgcgtatatgctaataaaattctaaatctcctatagttagtcaatgaccttttgcaccgctttgcggtgctttcctggaagaacaaaatgagttatacaccgatgagtgatctcggacaacaagggttgttcgacatcactcggacactattgcagcagcccgatctggccagcctgtgtgaggctcttagccaactggtaaagcgttctgcgctcgccgacaacgcggctattgtgttgtggcaagcgcagactcaacgtgcgtcttattacgcgagccgtgaaaaagacacccccattaaatatgaagacgaaactgttctggcacacggtccggtacgcagcattttgagccgccctgatacgctgcattgcagttacgaagaattttgtgaaacctggccgcagctggacgcaggtgggctatacccaaaatttggtcactattgcctgatgccactggcggcggaagggcatatttttggtggctgtgaatttattcgttatgacgatcgcccctggagcgaaaaagagttcaatcgtctgcaaacatttacgcagatcgtttctgtcgtcaccgaacaaatccagagccgcgtcgttaacaatgtcgactatgagttgttatgccgggaacgcgataacttccgcatcctggtcgccatcaccaacgcggtgctttcccgcctggatatggacgaactggtcagcgaagtcgccaaagaaatccattactatttcgacattgacgatatcagtatcgtcttacgcagccaccgtaaaaacaaactcaacatctactccactcactatcttgataaacagcatcccgcccacgaacagagcgaagtcgatgaagccggaaccctcaccgaacgcgtgttcaaaagtaaagagatgctgctgatcaatctccacgagcgggacgatttagccccctatgaacgcatgttgttcgacacctggggcaaccagattcaaaccttgtgcctgttaccgctgatgtctggcgacaccatgctgggcgtgctgaaactggcgcaatgcgaagagaaagtgtttaccactaccaatctgaatttactgcgccagattgccgaacgtgtggcaatcgctgtcgataacgccctcgcctatcaggaaatccatcgtctgaaagaacggctggttgatgaaaacctcgccctgaccgagcagctcaacaatgttgatagtgaatttggcgagattattggccgcagcgaagccatgtacagcgtgcttaaacaagttgaaatggtggcgcaaagtgacagtaccgtgctgatcctcggtgaaactggcacgggtaaagagctgattgcccgtgcgatccataatctcagtgggcgtaataatcgccgcatggtcaaaatgaactgcgcggcgatgcctgccggattgctggaaagcgatctgtttggtcatgagcgtggggcttttaccggtgccagcgcccagcgtatcggtcgttttgaactggcggataaaagctccctgttcctcgacgaagtgggcgatatgccactggagttacagccgaagttgctgcgtgtattgcaggaacaggagtttgaacgtctcggcagcaacaaaatcattcagacggacgtgcgtctaatcgccgcgactaaccgcgatctgaaaaaaatggtcgccgaccgtgagttccgtagcgatctctattaccgcctgaacgtattcccgattcacctgccgccactacgcgagcgtccggaagatattccgctgctggcgaaagcctttaccttcaaaattgcccgtcgtctggggcgcaatatcgacagcattcctgccgagacgctgcgcaccttgagcaacatggagtggccgggtaacgtacgcgaactggaaaacgtcattgagcgcgcggtattgctaacacgcggtaacgtgctgcagctgagtttgccagatattgttttaccggaacctgaaacgccgcctgccgcaacggttgtcgccctggagggcgaagatgaatatcagttgattgtgcgcgtgctgaaagaaaccaacggcgtggttgccgggcctaaaggcgctgcgcaacgtctggggctgaaacgcacgaccctgctgagtcggatgaagcggctgggaattgataaaagcgcattgatttaactgcaaattgccggacagatctgcctgtccggcatattattcatgaggttttttcggacgatatttttccggcagttctggcaccggacgcttgtcatcgatgagatgacgcacggttaagatcggatgacgccacagcattctcggcccggcccaacgcataatctgtttcatctcttcacgctttgcaggctggtaacagtgcaccggacactgcttacaggctggtttctcttcgccgaacacacatttatccagccgcttttgcgcgtaaacaaacaacgcctcgtaatgctccggctccgcactcgcctgcgggcatttcgcttgataaagatcgatcatttttttaatcgtcagtttttcacgagagatacgcttgccggacatgctgcctccacctcattaagatgtatttatattacatcttaatcttaaagggcactatgactccaaagaagaagggttagccaaccgatacaattttgcgtacttgcttcataagcatcacgcaaaagctgcaaaacagcatctttcccggaaccagcatcaagaactcgccgttcgcttcttcccctgaaatgattaactccggtatcatgtgcgccttatgtgattacaacgaaaataaaaaccatcacaccccatttaatatcagggaaccggacataaccccatgagtgcaatagaaaatttcgacgcccatacgcccatgatgcagcagtatctcaggctgaaagcccagcatcccgagatcctgctgttttaccggatgggtgatttttatgaactgttttatgacgacgcaaaacgcgcgagccaactgctggatattagtctgaccaaacgcggtgctagcgcgggagagccgatcccgatggcggggattccctaccatgcggtggaaaactatctcgccaaactggtgaatcagggagagtccgttgccatctgcgaacaaattggcgatccggcgaccagcaaaggtccggttgagcgcaaagttgtgcgtatcgttacgccaggcaccatcagcgatgaagccctgttgcaggagcgtcaggacaacctgctggcggctatctggcaggacagcaaaggtttcggctacgcgacgctggatatcagttccgggcgttttcgcctgagcgaaccggctgaccgcgaaacgatggcggcagaactgcaacgcactaatcctgcggaactgctgtatgcagaagattttgctgaaatgagcttaattgaaggccgtcgcggcctgcgccgtcgcccgctgtgggagtttgaaatcgacaccgcgcgccagcagttgaatctgcaatttgggacccgcgatctggtcggttttggcgtcgagaacgcgccgcgcggactttgtgctgccggttgtctgttgcagtatgcgaaagatacccaacgtacgactctgccgcatattcgttccatcaccatggaacgtgagcaggacagcatcattatggatgccgcgacgcgtcgtaatctggaaatcacccagaacctggcgggtggtgcggaaaatacgctggcttctgtgctcgactgcaccgtcacgccgatgggcagccgtatgctgaaacgctggctgcatatgccagtgcgcgatacccgcgtgttgcttgagcgccagcaaactattggcgcattgcaggatttcaccgccgggctacagccggtactgcgtcaggtcggcgacctggaacgtattctggcacgtctggctttacgaactgctcgcccacgcgatctggcccgtatgcgccacgctttccagcaactgccggagctgcgtgcgcagttagaaactgtcgatagtgcaccggtacaggcgctacgtgagaagatgggcgagtttgccgagctgcgcgatctgctggagcgagcaatcatcgacacaccgccggtgctggtacgcgacggtggtgttatcgcaagcggctataacgaagagctggatgagtggcgcgcgctggctgacggcgcgaccgattatctggagcgtctggaagtccgcgagcgtgaacgtaccggcctggacacgctgaaagttggctttaatgcggtgcacggctactacattcaaatcagccgtgggcaaagccatctggcacccatcaactacatgcgtcgccagacgctgaaaaacgccgagcgctacatcattccagagctaaaagagtacgaagataaagttctcaccagtaaaggcaaagcactggcactggaaaaacagctttatgaagagctgttcgacctgctgttgccgcatctggaagcgttgcaacagagcgcgagcgcgctggcggaactcgacgtgctggttaacctggcggaacgggcctataccctgaactacacctgcccgaccttcattgataaaccgggcattcgcattaccgaaggtcgccatccggtagttgaacaagtactgaatgagccatttatcgccaacccgctgaatctgagcccgcagcgccgcatgttgatcatcaccggtccgaacatgggcggtaaaagtacctatatgcgccagaccgcactgattgcgctgatggcctacatcggcagctatgtaccggcacaaaaagtcgagattggacctatcgatcgcatctttacccgcgtaggcgcggcagatgacctggcgtccgggcgcagtacctttatggtggagatgactgaaaccgccaatattttacataacgccaccgaatacagtctggtgttaatggatgagatcgggcgtggaacgtccacctacgatggtctgagcctggcgtgggcgtgcgaggaaaatctggcgaataagattaaggcattgacgttatttgctacccactatttcgagctgacccagttaccggagaaaatggaaggcgtcgctaacgtgcatctcgatgcactggagcacggcgacaccattgcctttatgcacagcgtgcaggatggcgcggcgagcaaaagctacggcctggcggttgcagctctggcaggcgtgccaaaagaggttattaagcgcgcacggcaaaagctgcgtgagctggaaagcattagcccgaacgccgccgctacgcaagtggatggtacgcaaatgtctttgctgagtgtaccagaagaaactagccctgcggtcgaagctctggaaaatcttgatccggatagtctcaccccgcgtcaggcgctggagtggatttatcgcttgaagagcctggtgtaataacaattcccgatagtcttttgctatcgggaatattaacgacaactgacgaataaaataaaaacaccctgtataataggaaagcttattttacagggtaaaaccatgccatctacacgctatcaaaaaatcaatgcccatcactatcgccatatatgggtcgttggtgatattcatggtgaatatcagttattacaatcccgcttacatcaactctcttttttccccaaaatcgacttacttatttctgtcggcgataatattgatcgtggaccggagagtcttgacgtcctgcgcctgctaaaccaaccctggtttacgagcgttaaaggcaaccacgaagcgatggcgcttgaggcattcgaaactggcgatggcaatatgtggcttgccagcggtggtgactggtttttcgatttaaatgatagtgagcaacaagaggcaatagatctgttgctgaaattccatcaccttccacatattattgaaatcactaacgacaacataaaatatgccatcgcacatgcagattatccggggagtgaatatctctttggtaaagaaatagcggagagcgaattactctggcctgttgatcgtgtgcagaaaagccttaatggcgagttacaacaaataaacggcgctgattattttatatttggacatatgatgtttgataacattcagacgttcgctaaccagatttatattgataccggaagcccgaacagcgggcggctgagtttttataaaataaagtaatctcatgcttcttctgtgaagcatgagtaacccggtgttattgcaggccattattcatttttcgctaccagcaaagagagatcctgcttcaccagcgcgcgactggcactctccggcaaaccgtcgtctgtaataatctgatcaaactcgcttaatggtaacgccagccatgtcgccacctgaccatatttcgtcgcatcacagaccaaaactcgctggcggctggcactggcaatcgcccgtttcaccgtgactttatcttccgctggcgtagaaatcccccgcacactccaactgcttgcagaaataaaagcctgatcaatcatcaggctgcgcagcatggtcgcagcggcttccccgacacaggaacggttttcccgacacactgcaccgccagtgtgaataattgtgcaattactgttgtcgagcaagtagtccgcaataacgaaatcgtttgtgaccacagtcagactctccatgtgaatcagatgctgtgctatcgctaacgtggtcgttcccgcatccagatagatacaacttcccggctgaacaagacttgccgccagcttgccaatagccgctttttgcgtcattgccagcgcagtttttacctgatgagaaggttcatgcgccacgcgtcccggagactggacgcctccggacaccagcacaacggctccctgctgctccagtttttgtaaatcccgacgaatggtcatatgactcacattcattctgtccgttagttcagcaatactgacaatgcctttttcagctaccatctcaaggatgatttggcgacgctctacgggtatcaacttttgctccttcctttgtcctgcactcattctacgctatttgcctgcgaaacgtgcgcggcgcaactaacgcttagttcacataaaataacacacaatgttaatttatgtgaatcagatcaccataccgttatcttccagcgcttatattcacaatatcaaacaaaatatcacttaaattaacaaggagagcagatgaaaacgggatctgagtttcatgtcggtatcgttggcttagggagtatgggaatgggagcagcactgagttatgtccgcgcaggtctttctacctggggcgcagacctgaacagcaatgcctgcgctacgttgaaagaggcaggtgcttgcggggtttctgataacgccgcgacgtttgccgaaaaactggacgcactgctggtgctggtggtcaatgcggcccaggttaaacaggtgctgtttggtgaaacaggcgttgcacaacatctgaaacccggtacggcagtaatggtttcttccactatcgctagtgctgatgcgcaagaaattgctaccgctctggctggattcgatctggaaatgctggatgcgccagtttctggtggtgcagtaaaagccgctaacggtgaaatgactgtcatggcctccggtagcgatattgcctttgaacgactggcacccgtgctggaagccgttgccggaaaagtttatcgcataggtgcagaaccgggactaggtagcaccgtaaaaattattcaccagttgttagcgggcgtacatattgctgccggagccgaagcgatggcacttgcagcccgtgcggggatcccgctggatgtgatgtatgacgtcgtgaccaatgccgccggaaattcctggatgttcgaaaaccggatgcgtcatgtggtggatggcgattacaccccgcatagtgccgtcgatatttttgttaaggatcttggtctggttgccgatacagccaaagccctgcacttcccgctgccattggccagtacagcattgaatatgttcaccagcgccagtaacgcgggttacgggaaagaagacgatagcgcagttatcaagattttctctggcatcactctaccgggagcgaaaagttgagctaaactctaccgggagcgaaatcatgatcaagattggcgttatcgccgatgattttaccggcgcgacggatatcgccagttttctggtggaaaacggtctaccaacggtacaaattaacggtgttccaacaggtaaaatgccggaagcaatcgacgcactggtgatcagcctgaaaacgcgctcctgtccagtggttgaagccacacagcaaagcctggcggctctgagctggttgcaacagcaaggttgcaaacagatctatttcaaatactgctctactttcgacagtacggcgaaaggtaatattggcccggttaccgatgccttaatggatgctctcgacacgccgtttacggtcttctctccggccctgccggtcaacggacgtacggtttatcaggggtatttgttcgtaatgaatcaactgctggccgaatccgggatgcgccatcacccggtaaatcccatgaccgacagctatcttccccgtctggttgaagcgcaatccacagggcgctgcggcgtcgttagcgcacatgttttcgaacaaggtgtggatgccgttcgtcaagagctggctcgcttacagcaagagggctaccgctacgcggtgcttgatgcgctgaccgaacaccatctggaaattcagggagaagccttgcgcgatgccccactggtaacgggcggttctggtctggcgattggcctggcccggcagtgggcgcaagaaaacggtaaccaggctcgcaaagcagggcgtccgctcgctgggcgcggcgtagtgctctccggtagttgctctcaaatgaccaaccgccaggtagcacattaccgtcaaattgcaccagcccgtgaagttgatgtggcacgctgcctcagtattgaaactctggccgcttatgcacacgaactggcagagtgggttctgggccaggaaagtgtacttgctccactggtttttgccaccgccagcactgacgcattggcagcaattcaacagcaatacggtgcacaaaaagccagtcaggcagtagaaacactgttttctcaactagcggcgcggttagcagcggaaggcgtgacacgctttattgtcgcaggcggtgagacctccggcgtagtcacacagagcctgggaataaaagggtttcatattggcccaaccatttccccggcgtgccgtgggtaaacgcactggataagcctgtctcactcgcccttaaatctggcaacttcggtgatgacgcctttttttcacgagcccaaagagagtttttatcatgagcgatttcgcaaaagtagagcagtctttgcgagaggagatgacgcggattgccagtagtttctttcagcgcggctatgcaaccggtagcgctggcaatctgagcctgcttttacctgacgggaatttactggcgacaccgacaggtagttgcctgggcaatctcgatccgcagcggctttccaaagtcgccgcggatggcgaatggttaagtggtgacaaacccagcaaagaggtgctctttcatctggcgctgtatcgcaacaatccgcgctgtaaagcggtggtgcatttgcacagcacatggagcacggcgctttcctgcctgcaagggctggacagcagcaacgttattcgtccgttcacaccatacgtggtgatgcggatgggaaatgtcccgctggtgccttattaccgaccgggcgataaacgcatcgcacaggatctggcggaactggcagcagacaatcaggcttttttactggcaaatcatggcccagtggtttgcggtgaaagcctgcaagaagccgccaacaatatggaagagctggaggaaacggcaaagctgatttttattctcggtgaccgcccgatccgttatctgaccgcaggtgaaattgcggaattaaggagttaatgcaatgcctcgttttgcagctaatttatccatgatgttcaccgaagtgccttttattgaacgcttcgccgcagcgcgaaaagccgggttcgatgctgtggaatttctgtttccctataactactccaccctgcaaatccaaaagcaactggagcaaaaccatctgacactggcgctgttcaataccgctcccggagatattaatgcgggggaatggggattatccgcccttcccggacgtgagcacgaagcacacgcagacatcgacctggcactggaatatgcattggcgctcaattgtgaacaagtccatgtgatggcaggcgtcgtgcccgctggcgaagatgctgaacggtaccgggcagtatttatcgataatatccgctacgctgccgaccgctttgcgccacacggcaagcgaatattagttgaagcactcagccccggcgttaagcctcattatctcttctccagccagtatcaggcactggctattgttgaagaggttgcgcgagataacgtgtttattcaactagatacttttcatgcgcaaaaagtagatggcaacctgacgcatttaatccgcgactacgccgggaaatatgcgcacgtacaaattgccggactacctgatcgacatgaaccggacgatggagaaatcaactatccgtggctgttccgcctgttcgatgaggtgggatatcagggctggatcggttgtgaatataaacctcgtggcctcaccgaagaagggcttggctggtttgacgcctggcgctaattcgttaaatccctaattacaacgtacccatacatccccccatctacggatggggtaggttaactataactttcagacagggtttcccatgtccacaattacattgttatgcattgcgttagctggcgtaatcatgctgttgctgctggtcatcaaggcaaaggtacaaccattcgttgctttgctcctcgtcagcctgttagtcgcacttgcggcaggtataccggcgggcgaagtgggtaaagtgatgatcgccgggatgggcggtgtgcttggttccgtcactattattattggtctgggcgctatgctggggcgtatgatcgaacactctggtggtgcagagagtctggctaattatttcagtcgcaagttaggtgacaaacgaactatcgctgcgctgactctggcagcgttcttcctcggtattcccgtcttctttgatgtcggctttattattcttgcgccaatcatttacggttttgccaaggttgccaaaataagcccactcaaatttggcctgcctgtcgctgggatcatgctcactgttcacgtggcggtaccgccgcatccaggccctgtcgccgcagcggggttactccacgcagacatcggctggctaaccatcatcggtattgcgatttctattcccgtaggggttgttggctactttgcagcgaaaataatcaataagcgccaatatgcgatgagtgtagaagtactggaacagatgcaactggctccggccagtgaggaaggcgcgacaaaattaagcgataaaataaatccaccgggcgtcgcgctggtcaccagcctaattgttattcctatcgcgattatcatggcgggtacggtttccgcaacactgatgccgcctagccatcccctgcttggtacgctacagctgatcggcagtccaatggtagctctaatgattgcgctggtgctggcattctggttattggctttacgtcgcggctggagcttacaacacaccagcgacattatgggcagtgcgcttcctactgcggcggtagtgattttggttactggtgctggaggggtatttggcaaagtgctggtggaaagcggcgtcggcaaagcccttgccaacatgctacaaatgattgacctgcctctgttaccagccgcatttattattagtctggcgctgcgtgcaagccaggggagtgcaaccgtagcaatactgacaaccggcgggttactcagtgaagcggtgatgggattgaatccgattcagtgcgtattggtgacgctggcagcctgctttggtgggcttggtgcgagtcatattaatgacagtgggttctggattgtgaccaaatatctggggttgagcgtagcagacggtctgaaaacctggacagtgttaacgaccattctcggttttaccggactcttaattacctggtgcgtatgggcggtaatttgaccttaataaaaaggtccgatgggcatcggaccttttattgtgcacagaaaaggccagcctcgcttgagactggcctttctgacagatgcttacttactcgcggaacagcgcttcgatattcagcccctgcgtttgcaggatttcgcgcaaacggcgcaggccttcaacctgaatctggcgaacacgttcacgggtgaggccaatttcacgacctacatcttccagtgttgccgcttcgtaccccagcaaaccgaatcgacgtgccagcacttcacgctgtttggcgttcagctcgaacagccatttgacgatgctctgcttcatatcgtcatcttgcgtggtatcttccggaccgttctctttttcatcggccaggatgtccagcaacgctttttcggaatcaccacccagcggggtgtctacgctggtaatgcgctcgttaagacgaagcatacggctgacgtcatcaactggcttatccagttgctctgcgatctcttccgcacttgattcatggtccagcttatgggacaactcacgtgcggttcgcaggtaaacgttcagctcctttacgatgtgaatcggcaaacgaatagtacgggtttggttcataatcgcccgttcaatcgtctggcgaatccaccaggttgcgtatgtactgaagcggaaaccacgttccgggtcaaacttctctaccgcgcggatcagccccaggttgccctcttcgataaggtccagcaacgccagaccacgattgccataacggcgggcaatttttaccaccagacgcaagttactctcgatcatccggcggcgagaggcgacatctccacgcagtgcgcgacgcgcaaaataaacttcttcttcggccgttaacagtggactataaccaatctcaccaaggtaaagctgagtcgcgtccaacacacgctgtgtggctccctggcttaacagttcctcttcggccaaatcgttatcactgggttcctgttctactaaggccttttcgtcaaaaacctcaactccgttctcatcaaattccgcatcttcatttaaatcatgaactttcagcgtattctgactcataaggtggctcctacccgtgatcccttgacggaacattcaagcaaaagcctggttccgccgatttatcgctgcggcaaataacgcagcgggtttacggatttccccttgtaacgaatttcaaaatgcaagcgtgtactactggttccggtgctacccatggtcgctattttttgccccgccttaacttcttgttgttcccggaccagcattgtgtcgttatgggcgtaggcactcaggtaatcatcattatgtttgatgataatcagattaccgtagccgcgcagcgcgttaccagcataaacaacgcggccatctgcggtcgcgataattgcctgtcctttgctgcctgcgatatcaatccccttgttgcccccctcagaagcgccaaaggtttcgatcactttgccctcagtcggccagcgccaggtggagataggcgtactggtacttgtactgctgacagtcggctcggttgtgcttgctgttggtaccgttacaggcgctgtgaccgtggtcgcagttggcttgttgttcggcaacattttgttagcactctgttcaccgctagactcagaatacgtaattgtcggttggctcgcaacagcaacggtggaattttgtgcaggcttgatcacaactccttgctctgctgcgtcggcctgggtaatggcatttccgccagtgattggcgtaccggaagcattacccacctgcaaggtctgaccaacgttcagcgcgtatggtgcctgaatattgttgcgctgagcaaggtcacggaaatcgttgccagtaatccaggcgatatagaaaagtgtgtcgccttttttcacggtataggtactgccgctataactgcctttcggaatgttcccatactgacggttatagacgatgcgtccgttttccatctgtaccggctgctgagctactggctgcactggctggatttgcggttgttgagtagcctgaatttgtggctgctgcaccggctgaatttgcggttgctgcgctgtagacgtcgtccccattttcggcggcggcgtaatcaacataccagaattagtatttgcaggcgcattgccattaacggagctgaccggtgccggtggattactagtgtcagaacagcctgccagccataggctaaccagactcaaagccgcaatgcggcgaacggtgaattttgggcttcccgcgctcatttatcccccaggaaaaattggttaataaccagtgacataattaccgtgcaaggcaccctactgaacactggaaaagatgttcacgatacgctgacctgcggcaaaataaccaggaaaaatccaggtatttcctcacgttttaagccagctcacccttcactaaagggacaaagcgcacggcctccacggtatcgataataaattcgcctccccgacgacgcacccgtttcaaatactggtgctcctcccctacgggtaagacgagaatcccgccttcgtccagctgcgtcattagcgcagttggaatttccggcggtgccgccgtaacaatgatagcgtcaaacggcgcacgtgcctgccaaccttgccatccatcgccatgacgggtactaacattatgtaaatcaagatttttcaggcggcgacgtgcctgccactgcaagcctttaatccgttcaacgctgcaaacatgctggacaagatgcgccaggattgccgtttgatatccgctaccggtgccaatttccagcacccggctctgcggcgtcagctcgagtaattcggtcattcgcgccaccatatatggctggctaattgtctgcccctgacctatcggcaaagcgatattgtcccaggctttttgttcaaacgcttcatcaacgaatttttcacgcggcacggcggcaagtgcattcagcacctgctcatcctgaataccttgcgcacgtaattgatccagaagtgcttgtacgcgtctgcttaccattgcgtgccaactcccacgctgtttaaccagtcactaaccacatcttgcgcgctatgcgcagttaaatccacatgcagcggcgtgatggagacatagccctcatctaccgcagcaaaatcggtccccggaccagcatcacatttaccgcccggcgggccaatccagtacagcgtattgccgcgcggatcttgctgcgggatcacctgatctgccggatgtcgtgtaccgcagcgcgtcacgcgaatacctttgatttgatccaagggtaaatccggaacgttaatattaagaatacgcccggtgcgcagcggctctttacacagtgcgcgcaaaatactacaggttaccgccgcggcagtgtcgtaatgtttatgcccgtcaaggctgacggcaagcgccggaaaacctaaatgacggccttccatcgcggcggctaccgtaccggaataaataacatcatcccccagattcggcccggcgttaattccggacacaacaatgtccgggcgcggacgcatcagagcattcacgccaagatagacgcaatcggtcggggttcccatttgcacagcaatatcaccattttcaaaggtaaacgtgcgcagggaggattccagtgtcagagaattactagcgccgctgcggttacgatcgggggcgaccacctgaacgtcagcaaactcacgcaaggctttcgccagcgtttgtataccgggtgcatgtaccccgtcatcattactcagcaatatgcgcataatcacctgttgtgttgataagttccctgacaacgctggttgcaaaactacccgccggaagccagaaacggatctctacggtgacgtcatcccaccaattccagcttaattgttgcggatacagcagcatcgctctgcgcgcggcttcaactttttcgcgcaccagtaaagcttgtaattcagtttctgcggcgacagctgcttgttcgaatgccagcgcttcacgctgagttccccattcgccactgcctggcaatgcggcggttatcatcaactctttatcgttgacgcgacgctgtaattccgccagttcttcggtggttgcgacaaaccagctaccacgtccggctaattgtagcgcatcgccgtcaacaacttgattaacgtctgcttttttgaggcgctcagcaacaatctgattaaacaacgcactgcgggctgcgctcaaccaaaaactccgtttattgcgatcgcgcaccggagtattggtttgcgcccagcgctgcgccccctgcaagttgctaccgccaatcccaaaacgttgggcaccgaagtagttcggtacaccttttacgcaaatatcgatcagacgttgttcaacgtcatcgcgattgctcacttcgcgcagaaccagggtaaaggcgttacctttcagcgcgcctaaacgcagcttgcgcttgtgccgcgcatactccagcacctggcagccttccagttgaaaggcgctcagatcgggcatttccttgcccggcacgcgagcgcataaccactgttccgtaacagcatgtttgtctttttgcccagcgaagctgacttcacgggcatgaattttcaggaatttcgccagtgcatccgccacaaaacgggtattgcagccgtttttgaggattctaaccagaatatgctcaccttcaccatcaggctcaaagcccaaatcttccaccaccacaaagtcttccggattggctttcagcagcccggtgccttgcggtttaccgtggaggtaagtgagattatcaaactcaatcattttgttgccttaatgagtagcgccaccgcttcacaggcaatcccttccccacgtccggtaaatcccagtttttccgtagtagtggctttcacgttaacatcatccatatggcagccgagatcttcggcaataaacacgcgcatttgtggaatgtgcggcaacatcttcggtgcctgagcgatgatagtgacatcgacgttgccaagggtataacccttcgcctgaatacgacgccaggcttcgcgtagcagctcgcggctatcggcacctttaaatgccggatcggtatccgggaacagcttgccgatatcccccagcgccgccgcgccaagcaatgcatcggtcaacgcatggagcgccacgtcgccatcagaatgcgccagcaatcctttttcgtaaggaatgcgtacgccaccaatgataattgggccttcaccgccaaaggcatgtacgtcaaaaccgtgtccaattcgcattatgtattctcctgatggatggttcgggtgaggtaaaactcggccagtgccaaatcttccgggcgcgtgactttaatgttatccgcacggccttcgaccaactgaggatggaatccgcaatattccagcgcgctggcttcgtcggtaatagtcgcgccttcatttagagcgcgcgtcagacagtcatgtaacagctcacgagggaaaaattgcggcgtcagcgcgtgccataagccgttgcgatcaacggtatgagcaatggcatttttgcccggttcggcacgtttcatagtatcgcgcactggtgcggcgaggatcccccccgtgcggctggtttcgctcaacgccaacaatcgcgcgaggtcatcctgatgcaaacaaggacgagcggcgtcatgcaccaatacccactgcgcgtcgccagcggctttcagacctgccagcacggaatcggcacgctcatcaccgccatctacaacggtgatttgcggatgattcgccagaggaagttgtgcaaaacggctatcgccaggacttatggcaatgacgacacgtttcacccggggatgcgccagcagcgcatgcacgctgtgttcaagaatggtttgattaccgatactgagatattgcttaggacattccgtttgcattcgacggccaaatccggccgccggaaccacggcgcaaacatccaaatgagtggttgccatgttaattcccgggctgatttatcgattgttttgccccgcagactgtgcgcgcttgctcgcgtcaggcaccagacgataaaaagtttcgcccggcctggtcatgctgagttcattacgcgcacgctcttcgagcgcctcctggccgccattgagatcgtcaatttcggcaaaaagttgatcgtttcgcgctttaagtttcgcgtttgtagcttgctgtgccgccacatcatcattgacgcgggtatagtcatgtataccgttcttaccgaaccacaggctatactgtagccagaccagaatagccagcaacagcagcgttagtttacccatcctgccccctgaaaaacggcatcatcatcccatgcatccgaagacgactctacatcctctgttggggataccgcgacaacgcgggcaaatgtaccacatttgtccattgttacgtatacccagggcgtgcagaacataatctcattattagttacggtttgaattatgaacagaggagacgggaaagtacaaattagcccagtagccacataaacagtgcgccaaacataatgcctactgtcaccagggtgaaaacaatactgtagcgtagctttccgtccatcaaactatgcagcgcaatccccaccactaccgcgacgggcatcagcgccagaaagaaaggccaggtgtagataaagaagaacagcgtgttagagccataaatcaacatcggcatcgccagcgcaaataaccaggagataaaaccgaccacggcaccaggcagactccatgtggtttcttcatcctcagtaaggctgtcgttatttgttagtgtaatgttatggctattacgcatatttgatcctgttactttgacgaaccgggcatggaaacccggtggtgtctcaggatctgataatatcgttctgtctcaacagatctaataattgctgtaccaaatttgttactaattgttcaccattgagatgaatttctgcgctttcaggcgcttcgtaaacggaatctattcccgtaaagttgcgcagttcaccggcacgcgctttcttatataagcctttgggatcgcgggcttcgcaaatcgccagcggcgtatcgacaaacacttcgataaagcgcccttctcctacgcgttcgcgaaccatctggcgttcggcgcggtgtgggctgataaatgcggtcagcaccaccagtccggcttcaaccatcaaattcgccacttcaccgacgcgacggatattctctttacgatcggcatcgctaaaaccgagatcgctgcataatccgtggcgaacattgtcgccatccagcagatacgtactgacgccgagtttatgtaacgcctcctccagcgccccggcgaccgtacttttaccggacccggagaggccggtaaaccacagcactacaccacgatgaccgtggtgtagctcgcgttgttgcacagtgaccggatggctatgccagacgacgttttcgtcatgcagcgccattatttatcccccagcaaatcgcgcgcgccccagtgcggaaagtggcgacgaaccagagcattcaattccagttcgaatgcactgaattcagatggcgcagcagttgcctggctaactggctcgtgcaccataccggcacccacggtcacattgctcaggcgatcgataaaaatcagcccacccgtcaccggattttgttgataacgatctaacaccagcggctcgtcaaaagtgagatccacgaggccgatcccattcagtggcaggttttcaacttcacgctgggtaaggttattaatatcaacctgatagcgaatgccatcaacacgcgcgcgcgtcttcttaccggcaattttgatgtcgtaactctgccctggagaaagcggctgttccgccatccataccacatccacgctcgcgctctgcaccgccggtaacgcttcgtctgccgccagcagcagatcgccacggctgatgtcgatctcatccgtcagcaccagggtgatcgcttctccggcaaaggcttcttcgcgatcaccatcaaaagtcacgatccgcgcgacgttactttccacaccagagggcagcactttgacacgttgcccgacttccacgcgaccggatgccagcgttccggcgtaaccacgaaaatcgagattcgggcgattaacgtactgcaccgggaagcgcattggctgagcatccaccactcgctggatctccacggtttccagcacttcgagcagtgtcggaccgctgtaccacggcatactttcactttggcttgccacgttgtcgccttccagtgcagagagcggcacaaagcggatatccagattacccggcagctgcccggcaaaggtcaaataatcttcacgaatacgggtgaacgtctcttcactgtaatccaccagatccattttgttgatcgccacgaccagatgtttgatccccaacagtgtggagataaaactgtgacgacgggtttgatcgagcacgcctttacgggcatcgatcagtaagatcgccagttcacatgtgcttgcgccagtcgccatattgcgggtgtactgctcgtgccctggggtgtcggcgataataaatttacgcttctcggtagagaaatagcggtaggccacgtcaatggtgatgccctgttcgcgctcagcttgcaggccgtccaccagcagagccagatccagcttttcgccctgggtgccgtgacgcttactgtcgttatgcaggctactgagctgatcttcgtagatttggcgggtatcgtgcagcagacgaccaatcagagtacttttgccgtcatcgacgctaccacaggtcagaaaacgcagcaggcttttatgttgttgcgcaatcatccaggcttcgacgccgccttcattggcgatttgttgtgcaagtgcggtgttcatcttaaaaatacccctgacgttttttcagctccatagaccccgcctggtcgcggtcaatcacgcggccctgacgttcactggtggtggaaaccagcatctcttcgatgatttccggcagtgtttgtgcattactctccaccgcaccggtcagcggccagcagcccagcgtacggaaacgcaccatccgttttttaatcacttcgcccggttgcaggtcgatacggttgtcatcaatcatcatcaacataccgtcgcgttccagaaccggacgttccgcagcgagatatagcggaacaatgtcgatattttccagccagatgtattgccagatatcctgctcggtccagttagagagcgggaagacgcggatgctttcgcctttgttaatttgcccgttgtagttgtgccacagctccgggcgctgatttttcggatcccagcgatggaagcggtcacggaaagagtaaattcgctctttagcgcgggatttctcttcgtcacggcgcgcaccaccgaaggcggcatcaaaaccgtatttgttcagcgcctgtttcaggccttcagttttcataatatcggtatgtttcgcgctgccgtgcacgaatggattaatccccatcgccacgccttccgggtttttatgcaccagcagttcgcagccgtaggctttagcagtacgatcgcggaactcatacatctcgcggaatttccagccggtatcgacatgcagcaacgggaaaggcagcgtacctggataaaacgccttgcgcgccagatgcagcatgacgctggaatctttaccgatagagtagagcatcaccggattactgaattctgccgccacctcgcgaataatgtggatgctttccgcctccagttgccgcaggtgagtaagtcgtatttgatccataaccgttcctttgcaataccgctattttcttgccatcagatgtttcgactatagggagcgtaagagaacgaatgaaattaccaattagaatgagtagttccttaacggaataacgatttggcaaagctaatatcaaaaagtgcttaaggcaccggatttcgggcgtttaggaagatttgaaattgttttagcgcagcggcagtttcatactatggcggtaaaaaaatttgcatggtatttaaggactcactatgttttccgcattgcgccaccgtaccgctgccctggcgctcggcgtatgctttattctccccgtacacgccagcagtcctaaacctggcgattttgctaatactcaggcacgacatattgctactttctttccgggacgcatgaccggaactcctgcagaaatgttatctgccgattatattcgccaacagtttcagcaaatgggttatcgcagtgatattcggacatttaatagtcggtatatttataccgcccgcgataatcgtaagagctggcataacgtgacgggaagtacggtgattgccgctcatgaaggcaaagcgccgcagcagatcatcattatggcgcatctggatacttacgccccgctgagcgatgctgacgccgatgccaatctcggcgggctgacgttacaaggaatggatgataacgccgcaggtttaggtgtcatgctggaattggcagaacgcctgaaaaatacgcctaccgagtatggtattcgatttgtggcgaccagcggcgaagaggaagggaaattaggcgctgagaatttactcaagcggatgagtgacaccgaaaagaaaaatacgctgctggtgattaatctcgataacttaattgttggcgataaattgtatttcaacagcggtgtaaaaacccctgaggcagtaaggaaattaacgcgcgacagggcgctggcaattgcgcgcagtcacggaatagccgcaacgaccaatccgggtttgaataaaaattatccgaaaggcactgggtgttgtaatgacgcagaaatattcgacaaagcgggcattgctgtacttagcgtggaagcgactaactggaatcttgggaataaggatggttatcagcaacgcgcaaaaacacctgccttcccggcgggaaatagctggcatgacgtaagactggataatcaccaacatattgataaggctcttcctggaagaatagaacgtcgctgccgtgacgttatgcggataatgctacctctggtgaaggagttggcgaaggcgtcttgatgggtttgaaaatgggagctgggagttctaccgcagaggcgggggaactccaagtgatatccatcatcgcatccagtgcgcccggtttatccccgctgatgcggggaacaccagcgtcaggcgtgaaatctcaccgtcgttgccggtttatccctgctggcgcggggaactctcggttcaggcgttgcaaacctggctaccgggcggtttatccccgctaacgcggggaactcgtagtccatcattccacctatgtctgaactcccggtttatccccgctggcgcggggaactcccgggggataatgtttacggtcatgcgccccccggtttatccccgctggcgcggggaactctgcgtgagcgtatcgccgcgcgtctgcgaaagcggtttatccccgctggcgcggggaactctctaaaagtatacatttgttcttaaagcattttttcccataaaaacaacccaccaaccttaatgtaacatttccttattattaaagatcagctaattctttgttttcaaacaggtaaaaaagacaccaaccttaaaccatccaaatctaccggggtacgcctgtttaacccaaatgtctggaactcaaatcccgtttccgtattcgttgcccatgccatcactacattgccttcttccgccagtccagctatttgttcccagatcatttcacgaatttttgcggatacatcacctacatatacccctgcacgtacctccaacaaccagatggctaatctgcctcgtaagcgcggaggtacattttcagtgaccacgaccaacatactcatttcagctactccgatggcctgcatctcccagactaacaggaagcggaatggcaacaggctgtgcatcttcaggtggggccggcggttgtatttctccagcggcaagcacgtcctctataagcggaatcaatttggctaatgttttactactgcgaaaaatatccctgcacgccaaacggacttcccggtccggctcaccagggttacgacgcgctatctcaaaagctttcggtacaacagtgtcaaatttaatgatgtctgcaatatcgtaaacaaaggaaagaggctttcctgtatgcacaaacccaatagctggtgcataaccagctgcaagtatcgccgcttcagttacgccgtataaacaggaagttgcagcgctaatgcattggttgatcgtatcgcccttttcccagtctttcggatcgtagcgacgtccattccatgtcacgccgtattgcttcgccagaagtgcgtaggttgcccgcacgcgactgccttctatacctctgagttgctctacggagcgccgggcaggcgcaggttctccaaaccgaagttcaaacattttacgtacgaccttcagacgcaaatcttcatccagagcaagttttgcctgatagagcagcttatcactacgcgcacctccaggctgaccagaagcataaacacgaacgcccgcttcccccacccataccaacaatgttccaacttgcgcagccaggcgtacagctgcatggctaacccgtgtaccaggttccagcatgatgcaggcaacgctgccaacaggaatatgagtgcggatccctgtcttgtcgataagtacaaacgcgccatctattacatcgatctgcccatattgcagaaagatcatggagacgcgatctttgagtggaatgggattaaggggaagccaggtcattttattacacctcaatcacagtggagccaaagatagcaagccacatcccatgcttttagctggcccaataccttgctgtacaagatctattaacgctggcgcgtcgttgatggtgagcacaccttcaaagcaaaccgtttggatctttccacttttaccatcaccagaaaaatactgtggccgttcgcttatgggatgcacatcttcaacgcgcgccgcattgcccaatttacgttgcaaccacgcgatttgttctgcttcttttattaacggaacccgacagcgtttaatattccctttactgtccaggcgcttttgattgtcgagaatagttttgatcggatttgcccgaagccgaaaatagagtggaacaccaacctgaagttgaaattcaacctgtttagttttaatgactgtcgcaacggcagtactaacaggcatttgcgcactctgcaataaaacatgacagccttctggtgtgtttcgcttctcaacatgaaaaagaaaatcacgagcagcatccggtctgtttggaaataaatgccataatccctggtgaagttggtaaagatccctgctccaggccctggcaatgatgactttactgagatacatccatacctcctttaatcacataccattctcgggaagcaaattgtcgaggcaaggtgatcatcggttcgtcgcgcgccgtaaattttaaatgatgccctgtaacactttcctcactatatatatcgccgccaacgggctcataatttaatagcgccttctgaggatcgcttgcctgacatgtccccaaaaaaagcgggtgtgttagtgggcaacttctccgccccaggtaaggtgtataccgaggctttaatactgctttttcaagttcactgataaccatcgttgcatggggtgttaaccagagagcgacggtaaaggaggcatcacataaatattcgcgccatgtttgaatcgtttcatgacttttcaaaccacggtaatcttctcgcgctccaaggactgtatggtaatcacgcaaccccgttacagacacacgacgatcgtcaagaatgagttcatcgcagcgcactgcaaattgcacactctcacttaacgcctgtaaactagaagtatcatcacgttggatcccaagacaagccccgagtagccctaataacccgcttcgggtcggaaatcttccggtaggtcgcgttccttcaaaggtcggctgcccccaggcttgcattggcccagcaagccgcaagatcaaataagatctcatgttcacgcctcgccattattacgaacccaggattttaactgttctaaagtaggcatttgtttaacttgagcagtaattgggtctacatcagataagctgaattgcgcagcagctccgttcagaccatatccattggcaacgcgatcccaatattgattaaacgcctgtatagacggttgcaaaaagccatctttcgctttaaccgctttttcaaaagcatttgccatagaaagtggcatatcggagaaattaaccattaccatatccgcagggttaaaagcggcataagtacgctgttttgctccagggacctctgttgccagcatatgaacaacatgggttgcaatttccagagcctgctccctggaggcaccacctaaattttcctgaagttgagcgaggttaatgttggcataacgataaaaaacaccgctactaaattcctgagttcccagatgtgcagaaccttgttcctgtaaatcatctacagcggtgaaccagtcaatatcagaatcaacctgatgagtagtgatcgcatgcgcaatggacattgcaccatcaacttttcccaactcagtcatcatgccgctggttgccattcttccactaagcgcaatatcaacaccctgctgtaaattcacacgtatggcggcaatatcttccttaagaactttgagcagctttttatcatccagattatcagcctctgcttttgcaacctgctcacagaaccaggctatttctcccacaacccagggagtaaccgcatcggcagaaatcttttcggcttcatcaacacttttaccggagagcagcgctaatgtcttatcgatgattttttggtcaaaacgttcaccaagtttttgccgaagaacatcacgtaattgtgcaagatgaatggttctgagactggattcaccaatattttgtgcgtaataaccacttttacgcatcgcacgtttaaggctttgactactaattcttactcgtcttttgccgccgaaaatagcgtctttctgcatgttcatatcgtcgcggttcagacaactagggctgtgagagatcagaacatgaatattgataaagttagacatagaaaggtttccttacgcatttttgtttgtggtcaatacaaaatcttccagaagttgctggcgttcgcgctttccccaccaggtcaacatcctggccattaatggccagtcaagtacgggttcggcgtgagtaagtaatcgacgtaactggaccatatcggctgttctgtcagcccgaattaattgaaagatacggcgctcgttaattcttccactattggctaaagctcttcccaagctgatacctgttgtttgctcgctttttttgtcctgatgtcggatgacattctttcctgcgctcaggcaaaacaccatgcgcaaaagagcctgctggtgacgtgggttttcccaaccaaaaggttgcaccagcctataaaacgcagggatatcgcgtaattcatcaggttcactaacacgtctaatttgcgcacaacttccattatccagttgttgccaggctcgatataaagccattgcatcaatttcatcagccattacttggccctccttgcggttttaactcccgtaaatgtttgtatagcgtggcgcgggcaagcgctaatgtgcttattaatttaggatgatgtgcatagggagctacagattgattaaatagcatttcacacaattgatgaagtttgtctcgtaaatcagctattacctcatcagcctgggaaaaattaacattcgccagtacatcgggaattaataattcactctgtcgatagaaatgcctttctgcagtctcatgaacagagactccggcccctttgaagtctttatttttaaacccttctgcaaaggtatataacgccttgcgtaaggctgttttatatcccaaaccaacagtcactatttcgtttatcacattgccgtattgttgccacccctgattaaacatcaacacatcatgacgccgttcaagaatagatgcttgattattacgatatccccccataatcaattcaagaggactttgcggcgcaatatttctgaattgattcacaaccgccgccacgcgatttccattttcattttgaataatcttatctaccacaactcggctgatttgtgtccaacttggtgcggaggtggtgaaagcaagaaatttttcctcaacctcccctttcttgactgttaccagacaaggggaatgcggatggggccatagcccattaactgtaaaggtaaatttttccttaagaaaaccggtataacgcaaattgctttcctgtccacagcaagaacatttaccaatcccaatgggatcgcataattcaatatgcgctggttgccagaatagaccacggacaaacccaatactgctagcaggtatagactcattggacttgataggtttaatccaggtaggttggttttccgtatgactttcattaggaaattgtttttgaagacgaggtaatgtgaggacattgagtaacaccgtactacgaagatcgatcccacgtacgaacgttgttacaggtgttcctccacgtaaaccgcttttaaaaccaccaccaaaacctggtgcctgattcgcctggttgaataacgcaatcgcagtgcatccaccacataatgcttcaccctgccccggttgattgacaaatgcacaattcgtcgcgccgcttaccccagccaacagtttttccattggagtcacatcatttgctttgacacctttggtctgcataaagggatgttctgcgtgattaaggtagaacatatctatccacggcgcgatgagttgttgaaactcatcttcagtgagcggattcattatgcgatgtcgaaattcaacgtcatcttttgccggggcgataatttgcccaatgcaaaccagcagtgctaaagcggccagttccatatcgtcacggggcaaacttaatcgccactgatctctactgcagtataggctttgcagatttatgatttggactttccccccgtttcgcgggcgtacagggatccagttatcaataagcaaattcatttgttctccttcatatgctccgacatttctcctgcatttctatacgtcggcacacttccgttatcggtaaaaacaaagaaaaaatacggcgtaattaattcaataatcacattcactgcaaaaatatattcattggtttaatacaattaacctatacatatattaagatgtgttgaattgtttaaagacaataatgcatgcatttcaaatctgcaagttattcgttttattattaaagaaacttttagttataataattaccatgaattttattacataaaatattcatactgtgaatataaaatctcataccgggaaattaaaagaagatgtacattgtgcaccttccctacttaagtagggataaaccgttattggtcttattatcgtcattgataacaatcattcccgaagttatttgggatttgcagggatgactctggtcatcccttcatcccctgtataggtaataacaatactgttaccctgccagacccatccatccagattctgtttcccttccagccaaagtaacccatcttcatctactacttcagaaaaactacgtttccaggtgaagggtacattgacgcgattaagtgcaagcgcctcatactgctgttcatgacttaggtcctcgtagacctggccatcgagcagttgtttaccactagacgtttgtacataaggcaataatggcaggctcatttccccatccctcgttaccgcaagaatggtttcatcgttatcctgcaagctatattcttcagcccactgcaggaccttgcgagccttgaaccttttttcacactcggcgctttcaaatttatccatgccattgccgacccattctggctcatccatttccgcatcatcgtaaatgctatccagccattgccggtaagcatcagggaaaaataaggatgctccattaagctcctcaatatgttgctgcgtccgccacatgactctaacgttgctataaatatgctcatgtcgtccgtaaccctcgccatcaggcagcaaaatggtggcaacaggaatctcaaaaccagcgggacgatatttgcgatgatggcgatgtaaacggcccaatcgttggaaaagcaaatctgcaggacaatgctgagtaattaaccaatcaaaatcaacgtcgagactttgttccacgacctgggttgcgacaagtatccgtccaacatttcgcttcccatttttgccgaaattgctaataactcgattctctttttcacgacgatcgttcagcgtaaagcgcgcatgaaacaaatctatatctacttgcgtgttatttagctcctttagccgttggtagcatacttgtgcaacgtcaaccaaattgcaaataagacagacctgtgcacccgcgtttgccgctgcgatcattcgctctaacatcgtaaggtcaggtaacatgtcagctaaacaaataggttctggctgaatgctaaagcggggcgggagttgttctggatgagctagcagatcaaaacgttgcgcaccattcacacctcgccagttaatgagtggatatgcggagttattttccactggatctgtatgcagaccataagtatccagaagtttctgtttttgtttcattggtagggttgcggaaagaagaataacactccctcccacatcagcctgagccttgagcactgcctccagcaagccgttcatataggtgtcgtaagcatgaacttcatcaacaattaaaacacttcgaccaattcccaaaccacggataaagcggtgtttaactggcaatacgcttatcaacacctgatcaatcgtgcaaacgccgatttgcccaagaaacactttcttattgctttgactcaaccactgacaacactgaacccacgcttcttcttgcccctgttcagtaatcgcgcgactttttatactttgaaagaggtggttaaaccgactattgccatgagcaagaataagatttggggaactaaataagtggctcgcgctcgcttccattctcgtaagcatagcattcgcggtagcttgtgttgggagggcaaaaataacactatccgcaatttgttgatcaataagtttccaagcataggccagcgctgtttccgttttaccggagcctgtaggtgcctctattaccgtcagcccgggagctactggaagagcatcaactaacacctgtaattgtctgggttgatagccattgtccagtagtgcatgaacaccttcataacatcgcttattacttacaagtccactcaactccaatacccggctcgcatcctgctgtcggtcctggaaatacgttctcagagcatttatgtcggaaggcgcatcctcattaaacagaaaggtattcgttgtagtccaggagcctaaccagtcagcaaggctgcaaaaacctgctaacagactactacaatcaggtggtatatcgtttatagataaccccgctggcgttaaaaataatgcttccagtacagatatccactcctcacgagcctgtttatcttgcgcagcataagatgccagagaagctggcatttcccaacggctcttatcttgatcctgggaatgtaatataaaaccatgatgtcctgtaacggcctctacccatggaaaccaggactcataaggatgaggagcggcatcaaaaaaactgaaaaaatccccgagagattgctcactaagactatcctggttaaaccaatacagaccggctgcaccatgattaaatttacggcacatttgtgtacttggaccattaagacttggcgttgcaggatttaatttcagccaactttctgcacttttatattggaatcgtatatcaaactttccaatatcatgaagagcaatgaaaaataacagccaggccttcaccctctgtttacttagcatttcatttcggcaaaaagtattttgcagtacgacactttgatcccaccagcaatctgcaacagcagcaacatcaaggcaatgataaattaacagatgaatatcatttcctttcgtcaagcttttactggattttccccagtaatggcatatatatttaaaaggttccattaatagcctccctgtttttttagtattatcgatgatatcagcgggctatttttcgatgctgctcataaatatcgaattacagtgatatacacatgtcttgcctccctgcaaagaagagactaacattcgaattgtttgggttcgaacgctggcctcaggttgatagaaatatcgcctggggcttttgtccatctggaacctcgcgaatgcttaacgccagacagcctcaagcacccgacgccattctatacctgataattcttcccgcggcgttcacgtttaaaatcaggaatgctgctcgcaaaataaaaacgcccccatcatttctgacagaggcgtttaatttgtccggcaatatttacccttcgtgtaacccacattccctttttaagccaaagaaacgcgtttcttcttccgccatgccgggttcccatttacgggttgtatgggtatcgcccacgcttaaatatccttcatcccataatgggtgatatttcaggccatgtttttgcaggtactgataaatagttcggttatcccagtcgataatcggcagcactttaaatacgccacgctgaattgccagcaccggtaaattggcacgactgccggattgttcacggcgcaggccagcaaaccaggtttgcgcattcagttctttcagagcccggttcatcggttcgactttgttgatgtcattgtacttttcaatgccttcaacgccctgctcccacagttttccgtagcgtgcttcctgccaggctgcgctttcggtagcacggtacactttcaggttgagcttgagtttgtccgttaactcgtcaataaagcggtaggtttccgggaacaagtaacccgtatcggtgaggatcaccggaatatccgggcgaatttgattcaccagatgcaggctcaccgccgcctgaatgccaaagctggaagaaagtacatattcaccgggcagattatccagcgcccaggctacgcggccttcagcgtccagtttttccagttcggcgttagtttccgccagcgccagaatgcgatctaccttcggcagttcgttcagggcgtttagatcgagtttggacatagattcctcactgtttgccttgcctgatgcgacgctcacgcgttcttatcaggcctacaagaccgggctgatggttaatcccacaaatcacgcgccggatcgagcaccgggcgaatgatgcccgcacgcaccgtaaagtcgccgaagccttcacccgcttcgcgctctttcgcccagcgccctatcagttcatcaaggctcgccaggatttccggctcggtgatgttttctttatacatccgtgggatacgtgtcccaatgcggttgccgccaagatgcaggttgtagcgacccggcgctttacccaccaggcccacttccgccagcatcgcgcgaccacaaccgttcgggcagcctgttacacgcatcacgatatgctcatcgctgacaccatgtttcgccattaaattatcgatgttgtcgataaaagacggcaggaaacgctctgcttccgccatcgccagcgggcaagtcgggaaactcacgcaagccatgctgttttcacgctgcggcgtgacggcattcattaacccgctctctttggcgatcttctcgatcttcgctttctcgctttccggtacaccggcgatgatcagattctggttcgccgtaatgcggaaatcgcctttgtggatcttcgcgatctccagcaggccggttttcagcggacgcgccggataatcaaggatgcgaccattttcgataaacagcgtcaggtgccagttatcatcaatgcccttaacccagccaatacgatcgcctcgtccggtgaactcatatggacggatcggttcaaatttgatccccgcgcgacgctccacttccgctttaaacgtctcaacccccacgcgctccagcgtgtatttggttttggcatttttacgatcggttcggttaccccagtcacgctgagttgtcacgacggcttcggccaccgccagcgtatgctccagcggcagatagccaaactcactcgcggtgcgggcgtaggttttcttgttgccgtgttcgatggaaagcccaccgcccaccaacaggttaaagcccaccagcttgccgttttcggcgatcgccacgaagttcatgtcgttggcgtgcagatcgatatcgttctgtggcgggatcactaccgtggttttgaatttacgcggcaggtaggtctggccgaggatcggttcttcatcagtagtggcgactttttcctggtcgagccagatctccgcatacgcgcgggtacgaggcaacagatgctcagaaatcttcttcgcccactcgtacgcttccgcgtgcagctggctctcgtaagggttgctggtgcagagtacgttacggttcatgtcgttagctgtcgccagcgcatcaagaccgacgctgtgcagcatctggtgcaccggtttgacgttctttttcagaatgccgtggaactgaaacgtctggcggttggtcaggcgaatgctgccatagatggtgttttcaccggcaaatttgtcgatcgcctgccactgtttagtggtaatcaccccacccggcagacgacagcgaagcagcatcgcgtggcgcggctccagcttctgttcagcacgttcggcgcggatgtcgcggtcatcctgctgatacatgccgtggaagcgaatcagcaggaagttgtcgcccttaaagccgccggtcagaccgtcgtttaaatcttccgcaatggtgccgcgcaggtagttgctttcatgcttcatgcgctcggcgtctgtcagttttccttcgaccactaaaggccctggatgtttttcgctcattagtagacatctcgctgataacggcgctctacgcgcagctcacttaaaaattcatccgccgcttcggtgtccatgccaccaaattcggcaatcacttccagaagtgcctgctcaacgtctttcgccatgcgattagcgtcgccgcagacataaatgtgggcaccatcattgatccagcgccacagctccgcgccctgttcgcgcagtttgtcttgtacgtaaactttttctttttgatcgcggctccaggcaagatcgatacgtgtcagcacgccatctttgacgtagcgctgccactccacctggtacaggaagtcttccgtaaagtgcggattaccaaagaacagccagtttttacctggcgcttcgtcggcggcgcgttgctgcataaaggcgcggaacggcgcaataccggtgcctgggccaatcataatcaccggggtttctggattggctggcaggcggaagttatcgttatgttcgataaatacgcggacttcgccctcttcttccacgcggtcagcgaggaagctggaggcaccaccggcacgggcgcggccttccacgtcgtaacgcaccacaccaacggtgacgtgtacttcgttctcgacttccgcctggctggaggcgatggaatacagacgcggcgtcagcgggcgcagcagattaattagcgcttcggcatcaagctgtgccggggagaaacgcaccatgtcaacaatcggcgtcgtcgcggcgtaatgctgtaacttcgctttatcgcccaccagcggcagcagtgtttcactgcgggtaagcgtggcgtaattctcaacaatgttggcggtgttgacggtcagttcgaagtgccactgtagcgcttcgttcagaggcaacgttttgccctcgacggtgacaggttcatcgcctttcagccacagcagttcgacaagttctttcaccagtgccggatcgttctgataccagacgcccagcgcgtcacccggctggtaacgcatgccgctgtcacctaagtcaatttcgatatggcgaacgtctttttcagagttacgcccggtaattttctggttaacagagaggctagccaccagcggcgcgtctttgctgtacgggctggtgtggatttcatttaccgcgccagtagcgacggattggctaggtgccgcgacaggcgcacggcttttaagcgcatcaaccacgcgggcgcgccactcgctggcagcagcctggtattcaacatcggcatcgacacggtcgagcaggcgttcaccacccagttccgccagcttgctgtcgaaatctttcccggactggcagaaaaattcataagagctatcgccgaggctaaacacggcaaacgcggtgttttccagctttggcgcttttttggagaacaggaacttatgcagcgcgacggcttcttccggcggttccccttccccttgcgtactcgtcactacgatgagcagtttttcgctggcgatttgtttgaatttatagtcgcccgcgttcaccagcttaacgttcagttttgctgctaataaatcatcacgtaatgcttcagcaacccggcgcgcattgccggtttggctggcggagataatagttatacccggcatttctgcggctggcgctggcgtcgctgcaagcgcagcaggctgctgattgagtacgccccagaaatagccagaaacccaggcaagctgggtgggagttaaatcggtcgtggccgcctgaaggcgtgccagttgctccgggttcaacggaagcaacgcggaaggtgggacctgtgtcgtcatgcgtcgttatgttccagtaagcaaagctgtttctgcgccctgtcagcgcccataaaacagaagagaaggtaaggttaacggggcaaacggtgtggattaaagacgggatagcgataactaataaccaaatcgactaacctgttttagcaatagtctttaacaacaaaatagattaaccaacctaatgaaaaacaaatgaatttagccaatcattaagataaatcagcgattttgcgcaacaaagtcgttttagataatgcgaaaaaacagcctttccggtactctacggcggttttatcgtcctgtagagaaattatgatgtccaccacgttatttaaagatttcaccttcgaagccgctcaccgcttaccacacgtcccggaagggcataaatgtggtcgcctgcacgggcattcctttatggtgcgactggaaattaccggggaagtcgatccgcatacgggctggattatcgatttcgctgaactaaaagcggcgtttaaaccaacctacgagcgcctcgatcaccattatctcaatgatattccaggtctggaaaacccaaccagcgaggttttagcaaaatggatttgggatcaggttaaacccgttgtgccgctgttaagtgcggtgatggtaaaagaaacctgcaccgcaggttgtatctatcgcggcgaatgataagagtgtgtcggcggtcaatttcccttaagtaacgctatgttagggtgttgtgttctggatatctggggcatgacatggaagacgactgcgacattattattattggtgccggtattgcaggcaccgcttgcgcgttacgctgcgcgcgagcgggtttatccgttttgttactggaacgcgctgaaatccccggcagcaaaaatctttccggcgggcggttatatacccatgcactcgcggaactcctcccgcaatttcatctgaccgcgcctcttgaacgacgcatcactcacgaaagcctttccctgttaacgcccgatggcgtaacgacgttttccagcttacagcccggcggtgaatcctggagtgtattacgtgcacgattcgatccgtggctggttgccgaagccgaaaaagaaggtgtcgaatgcatccccggagcgacggtggatgcactgtatgaagaaaacggcagagtctgtggcgttatttgtggtgacgatattctccgcgcccgttatgtggtgctggcagaaggtgccaacagcgtcctggctgaacgtcacgggttagtgactcgtcctgctggcgaagcgatggcgttggggatcaaagaagtgctgagcctggaaacatccgctattgaagaacgttttcatctggagaataacgaaggcgcagcgttgctgttcagcggcaggatctgtgatgacttacccggcggcgcatttctttatactaatcaacaaacgctcagcttagggattgtttgcccgctctcttcccttacgcaaagtcgtgttccggcaagcgagctgctgactcgctttaaagcgcatccggcagtgcgcccgcttatcaaaaacacggaaagtctggagtatggtgcgcatctggtgccagaaggtggcttgcacagtatgccggtgcaatacgccggtaacggctggctgctggtgggcgatgcgttgcgcagttgcgtcaataccggaatttccgtgcgcggcatggatatggcgctgactggcgcgcaggcggcggcacaaacgctgataagcgcctgccagcaccgcgagccgcaaaatctgtttccgctttatcatcacaacgtagagcgcagcctgctgtgggatgttctacagcgttatcagcatgttccggcgcttttgcaacgcccgggatggtaccgtacgtggcctgcgttaatgcaggatatttcccgcgatttatgggatcagggtgataaacctgttccaccgctgcgccagttattctggcatcatttacgtcgtcacggcctgtggcatctggcgggcgatgttatcaggagtctgcgatgtctgtaacgtaagatgttatcaggagtctgcgatgtctgtagcccgtaatctctggcgcgttgctgatgcgccgcacattgttccggctgactccgttgagcgccagacggcagaacggttgattaacgcctgtccggcaggtctttttagcctcacaccggaaggtaacttacgtattgactatcgcagttgcctggagtgtggcacctgccgtttgctgtgcgacgaaagtacactacaacagtggcgctatccgccttccggattcggcatcacctaccgctttggataaataataaggataatttatgcccctcttacacctgctccgccagaatccggtgattgctgccgttaaagataatgccagcctgcaactggcaatcgattctgaatgccaatttatttccgtgttgtacggcaatatctgcaccatcagtaatatcgttaaaaagattaagaacgccgggaaatatgcttttattcatgttgatttgctggaaggcgcgagtaataaagaagtcgttattcagtttttgaaactggtgaccgaggcggacggcattatcagtaccaaagccagtatgttgaaagcggcaagagcggaaggttttttctgtattcatcgcctgtttattgttgatagtattagctttcacaacattgataagcaagttgcgcaaagcaatccggattgtattgagatcctgccaggctgtatgcccaaagtgctgggctgggtgacagagaaaatccgccaaccgctgattgccggtgggctggtgtgcgatgaagaagatgcgcgtaatgcgattaacgcgggtgtcgtggcgctttccaccacgaataccggggtctggacgttagcgaaaaaattactttgacgggataatcgtaaccaattgaatttggtttgatttgtaggccgcacgccacatccgacattcagcgcctgatgcgacgcttgacgcgtcttatcaggcctacaagtccccaggccagaaccgtaggcaggatcatccggcaacacgttattggcaatctgcgtgaatgtttgtcaccagtgcctccagcaccactttccagtcatcaaccacgccaacatctgcctgactaaataccgcagcgctggcgtcatgattaatcgccaccacaaacttgctattgcgtacgcccgccattaacgctgctgcgccagaagcgccaacaacaatacacacctcaggtgccagcagatgtccggaaataccaatcactttttcagcatcaacgccaccgttcatcactcgcgcccgactgtagcccacttcggctcccagcttttctgccagcatagcgatttcctggttatctgcctctccgccctgccccaccaccagcacccgtctggcctcagctaatgggtcgcgggtaacatttttcagatcctctgtgctaaccagccagtccggaagcgcacccgggacaatgttcagttgttgcattccagagggcaacgtggcgtttttcgctgctcccgcctgacgcgccagggaaaggcatagcgggcgtttttctgtttgcagcgtcgccgttagcgcatttccccagtgggatttgcgcacgcttacggttggaatatctaagctagtcacctggcagatgcttgcaccatgtaaacgccaggccagccgggtgctcagttcatcgccaaacgttcccggcggaaagagaacaacgtccgcaggcgttcgctgccactgttccaccaacgcatccagcacctgttccgccactacaggctgaggttcaatctgccagtgcgccagggtacaaccgctgaaatcctgcgccgccagccagcttgctattgcggcattctcctgatttattgtcacaattgcgatattcatggctgcatcctttggcgtaaatagtcctgccatagcttttgagctttttctgctaccgtttgcccatcaatcagcgtcgctccgcgtcgttgctctgctcttgccagttgcagacactgcatcgctggcatttcggcagcaacagttttacggataatttctgctttccccgcagccattcgctggcgcattcccggtactggcaaggccacttcaccgcactgacgcacggcaatcaccgcaggcaagcgaacccggcaacaacgcaacccatgttcagtacgctgttcgagggtgataaacagcgcgtcgagagtgaaacgctccacctgggtgaagcagggccagcccagcatttccgccagcaaaaatggcgtttgcccattctgcccttcgctgctttggcagccggtaattatcagatccagcggattctgatgctgccattcggcaatatggcgagcgacaaattccggcgcaaagcgcagatctgccgccgtctccagcaatacagcttcctcaaacccaagagccatgagatagcgcagccagtgcaatgcccgttcatcccccatgctcaacgcggttaaagacatcggcgtaccgttttttctctgcgccaacagcagcgcggcagcggcctgttcatcagcaccgagtaaacttcgcagtaggctaatatccggtccgcttttaccctgagccgccgcctgccactctttttccgccagcattccggcatccggttcggctttaaacgctaacagaatgttcattcgcacctcctacatttcccgccgccaccagcgggagggctttagtttctggtgcccatagccaggtcacaacaaaaccaaccaacaacactgtcgccaggagcaataaggtgacttgcattccccactgcgccagcacccacggcagcaggccagtacttaccgccgcgccaagtcgactcatggcagtggcaaaaccgacgcccaggctgcgaatgtcagtaggaaaactttccgcaggcaaaatgcccaccagattactgactgcgctaatggtggtgctgaagagaacaaaaagcagcagcgttaaactactgccggaaggcaaacaggccatgactaccagcgttgccgccagcagcaaaaaacttcccagcaaaaatttgcgatgtgccagcaggtgcgtcagaactaatcccagcagcgcgcccacaattaacaacgcattaagcatcaggctggcagtcagcgcatcttccagaccaatagtctgggcgatagttggcagccaggtataaatcacaaaccatgggattacgaggcagacaaagaagacgctgttaaacgccgtgcgccgccagtaacggctagagaacaaggttttgatgtgtttatgggtcgccgttaccacttcatcgcccagtaaaacatggggaccaaaatagcgatgcacgatagcgtgagcttctgcaaaacgcccctggcgcagtagccagcgtggactttctggcgttccccagcgtaataacgtaatcaacaacgcgggcagagctgcgcttgccagtagccagcgccaggcctccgggttttcggaaataaagtgatgtccggcaatacttgccagcacatagcctacggtccacaccacgctgaatgcgcccagcaaaataccgcgatggcggcgcggggaaaattcagccagcaaggtgtgacctacactataatcgcctcccagaccaatgccaatcaaaatgcgcagtccaataagatgctctggcgtggtggcaaaaaattgtaaaaagctagcaagcgtaatcagcaaaaagctgaaggtgaagattttttgccgaccaatatggtcggagatccacccaagaaccaggctgccaaggaacaaaccaaggagcgcgctgccgccgatcattcccgccataaacggcgtcagttgcatggcgggcgtaagctgaataatggcgtaaccaatgacgccgagaacataaccgtcggtcaggtgtgcgccgaaagtgagcgcagcaatgcggcagtgaaaacggttaagcggtaaatcatccattcgcaccggactagtgttcatctttaccccttcattgtccggtaataagaacggcttctcgcctgagaagccgaaaaggcaacgccccgtcatcgcggaacgctgcctgacacattatttttcaatcggatagatagtacccgtattcataatgccattaggatcgaactgctttttcagcccttccagcaacgcccacgcgctgccgtgttccagtttgctccagtgaacgcgatgtttaccgataccgtggtggtgcaccatgctaccgccgaggcgaatggtttcttcacagatgatcttgttgagcggattgtggtacttgtcgatttcctcttccggcttacagtcaacgacgttgtaatcgtagacgaagtacatgttggtgccgttctgatagctatgagaggaatgaccgcccagcatggtgatgtcgtcggcgtgcgggaactcagtacgaatacggttaataacgctttcgtagatttcgtggatgcagctccagcagccggatacttcggtggtaaagcccatgttgccggttttgaggatctgcacacgttcggcagccactttatccggtccccagttcaggttgttaaaccaggtttcgatcagcttgctgtccacgcgctggcattgcgggtagcgggcaacgatttccgcaatcccttcgcccgtcaccttcgcaatgcgagggttaccttcagccataaagatcagcacgcattttccgtcggcaaaatgggtgaagtgttgggtgccatcttcagcgtcatacaaacgagcgatactcggacgatacccttccaccatgatttcacgcaggatgttgaagccggttttcatgtcttccaggatatagccgtagaagaggttgttttccggggtgaatttaaagattttcactgttacttcagtgatatagcacaatgcaccttcgttgccgatgatgatgtgacgaatgtccgggccagccgcgcggcgtggcacgtttttaatgcgtgtgacggtgccatcagccaatactgcttccagaccaacgaccatatcttcgattgcgccgtagagtgtggagaactgcccgatacttcgggttgctaccaggccgcccatctgcgccagcggcttactctgcggagaatgccccgtggtgtaacctttttcacgcaacgcgttttccagcacttccagcggaacaccacattgcgccgtcgcctgcatattctcaatatcaatattaatgatttgattcatggcggagccgtcgagcaccacgctgttttctacaacagtttccagcccaccttcggtggcggaagcaccggtacgcggcacaccgttaattttgtgcgcattcataaaattcagcacacgggatacttgctctgtggaaccgagttttacgaccgctgccggaatcggcaaagtataaatgccatgaatatccggaaatttacgaaaacggtcaatactgtttttctttaatactgtttcatcggtaattacgcgatctgcaccaacaatttcctttagctggtcgacaatcgctgcgcgagataaagacatagtaattccttcctgataataaaaatggaataatcattaataagagaaaacagaaaccaccgttatgggttagcgcactaaataaccgccatcaaccactaataaatgcccgttgacataattgcttgccggacttgcgaggaatacggctgcgcccattaaatcctgagtatcgccccaacggtttgccggaatatgatcaagaacgcgctgattggtttctggattactgcgtgtcgccagcgtaatatctgttgcataatagccaggggcgataccatttacctgaatattatattgacctagttcatcacaataagctttggtgaacccggcaagagcatgtttagtggcagaatatgcaggactccattgtccacctaagtaagagaacaaactacagatattaataattttgccgcttttctgcgggatcataatttttgcagcttcatagcttaactcgaatgcggcggtcaggttcacatcaatcatcggatcccagtcggcacgaccgaagtccagcaccttattcagcttacaaataccggcattgttaaccagaatatcaactgtaccgaaacgctcacagcaagcagcgataatcttctgcggcgcgccttctgcggtgatacccacctgcatgaagtccacctcaacaccctgtttttcaatcatttcctttgtttcgccgttatctttgacgaaactaggaataaagatatttgcgccagctttggccaacgccatggcaaatgcctggcctaaaccgctattcccaccggtaacaattgcggttttacctttcagggagaaaaaatccatactgaacgcattgagagattcgatactcatagttagctccaatttccgtaaggcaaaaaaaaagaaaggtaacttcccccgcgagagggaagttacctttctcattatctctggtaactggagataatttttagcataagggcataactgctaatgtgatcgtaatcacagtgtgatattcgtattgtcaaataattttaaaaagcagaagcgtgattactctcacacaacacctctgctttccatgttatttattatttcaattactagagacctgagaaaagtaatccacctgaaagggcggcttacttttctcttttttttgtctattacaaatgggaatacgatatgcaacacaacagttatcgccgttggataaccctcgcgataattagttttagcggcggcgttagtttcgacctggcttatttacgttatatttatcaaattcccatggcgaaatttatgggattcagcaataccgagataggtttaataatgagtacctttggtattgcggccattattctttatgcccccagcggcgttattgccgataaatttagtcaccgcaaaatgattacttccgcgatgatcattaccggattactgggtctgttaatggcaacgtatccaccgctgtgggtaatgctctgtattcagatcgcctttgcgataacgacgattttaatgctgtggagcgtgagcattaaagctgcaagcttgcttggcgatcatagcgagcaagggaaaattatgggctggatggaagggctgcgcggcgtcggtgtaatgagcctggcggtgtttaccatgtgggtcttttctcgctttgcaccggatgacagcaccagcctgaaaacggtcattatcatctatagtgtggtttacatcttgttggggattctgtgctggttttttgttagcgataacaacaacctgcgcagtgccaataacgaagaaaaacagagtttccagcttagcgacatcctggccgttttgcgtatcagcaccacctggtattgcagcatggtgatttttggcgtcttcaccatctacgccattctgagttactccaccaactatctgaccgaaatgtatggcatgagcctggtggcggcgagctacatggggattgtgatcaacaaaatattccgcgcgctgtgcggcccacttggcggcataatcaccacctacagcaaagtgaaatcccctacccgcgtgatccaaatcctttccgtactcggcctgctgacgttaactgccctgctcgtcacgaactctaacccgcaaagcgtcgcgatggggattggcctgattttactgctgggattcacctgttacgccagtcgcgggctgtactgggcctgccctggcgaagcgagaacaccgtcttacattatgggcaccacggtaggtatttgtagcgtgattggattcctgccggatgtcttcgtttacccaattatcggccactggcaagacaccctgcccgctgcagaagcctaccgcaatatgtggctgatgggcatggcggcgcttggcatggtgattgtctttacctttttgctgttccaaaaaattcgtactgctgatagcgcccccgcaatggctagcagcaagtaagccaggaaaattacaggagaaaaatcatgagcaaaaaatacatcatagggattgatggcggaagtcagagcacaaaagtggtgatgtacgatctggaaggtaacgtggtttgcgaaggcaaaggcttattacagccgatgcacacgccagatgccgatactgcagaacatcctgacgacgatttatgggcaagtttatgttttgccggtcacgatttgatgagtcagtttgccgggaataaagaagatattgtcggtattggtctgggatccatccgttgctgccgtgcgttattgaaagccgatggcacgcctgctgcgccgttgattagctggcaggatgcacgcgttacacgcccttacgaacacactaaccctgacgtggcatatgtcacctcttttagcggttatctgacgcatcgcttaaccggcgagtttaaagacaatatcgccaactattttggtcagtggccggtggattataagagctgggcatggagcgaagatgctgcggtaatggataagtttaatatcccccgtcatatgctgtttgatgtgcaaatgcctggcaccgtcctcggacatatcacaccacaagccgcactggcgacacatttcccggcaggactgccggttgtttgtaccaccagtgataaaccggtagaagctctgggggccggattactggatgatgaaacggcggtaatttctcttggcacttacatcgcattgatgatgaacggcaaagcactgccgaaagatccagtagcgtactggccgattatgtcttctattccgcaaacattgctgtatgaaggttacggtattcgcaaaggcatgtggacggtgagctggctgcgcgacatgctaggcgagagcttaattcaggatgccagggcgcaggatcttagtccggaagatttactcaacaaaaaagcttcttgtgtgccgccaggctgtaatggtctgatgacggtgctggactggctgaccaatccgtgggaaccgtacaaacgcgggattatgatcggctttgattccagcatggattacgcatggatatatcgtagcatactggaaagcgtggcgctgacgctgaagaacaattacgacaatatgtgtaatgaaatgaatcactttgcgaagcatgtgatcattactggcggcggtagcaacagcgatctgtttatgcagatttttgccgacgtgttcaaccttccggcacgacgtaacgccattaacggttgtgcaagcctgggggcagcgattaatacagcggtaggtctggggctatacccggattacgcaacggctgtcgataacatggttcgcgtgaaagatatctttataccgattgagagcaatgccaaacgctacgacgcgatgaataaaggcattttcaaagacctaaccaaacatactgatgtgatcctgaaaaaaagctatgaagtgatgcatggggaattggggaatgtggatagcatccagagctggagcaatgcgtaagtgaggaaggccgggcgggaaactgcccggcctgaacatacctgaatggttatccccgctgacgcggggaacataagttcgacaacttaaaaaatgataacaagtccggtttatccccgctgatgcagggaacataataaaaactttaactagttcggtttatccctgtttttacaaggaatattaactacactcgatgtctttagaataaaagacaatacgaatcgcactttatcaattttcacttaaagtatgaactggatatctttattcataagaactattcatcaacagcgtatagaggcggttatgtaaaaccactcattagcctcaaaacaaagacaaacttccagatttattacttaaccaatgaataacaagcttaaaaaatatactgttattctaaagaaaaaattaacaggcattaattcaatattaaaaaaataatagattaaaatttcttaacgatttaagaatcatacaaataacactttgattaaatttaattttttgtatcgataattgtgaacctctctggcatggagaactattttgaacatgaggtgttacgtggatatgttgcttattacaagtactgctaatataaaaacttgagaaagagataacgggttatatggtggtttatccccgctggcgcggggaactcgacagaacggcctcagtagtctcgtcaggctccggtttatccccgctggcgcggggaacacctgttttcgcaaatctatggactattgctattcggtttatccccgctggcgcggggaacacgggcgcacggaatacaaagccgtgtatctgctcggtttatccccgctggcgcggggaacactggctctgcaacagcagcacccatgaccacgtcggtttatccccgctggcgcggggaacacgaaatgctggtgagcgttaatgccgcaaacacaggtttatccccgctggcgcggggaacacattacgcctttttgcgattgcccggtttttgccggtttatccccgctggcgcggggaacactctaaacataacctattattaattaatgattttttaagccagtcacaatctaccaactttatagtatcacacaaacaacacatccattatgttaaagagcacttaatccattgattaaaaaggtaaatatttaaaataactctatacaaactaaaatctaccaaactttaccgcaataattttcactccagcgaaaaattaatgccacagaatttgtagagaatgctaatgattagccctggatgggtaaaatggaggagttttcagaggcgacaaacaatataaatgagtagaagtctttacaggttccacccatttataacgcttataaatgtttaatcaggcaatatttagatatttatgtgtttgcatgctcaaacgccaattacgcgcaatgcaggtttcaatgcacaaacgtgtggcatcatccttttggctaatcggctgcagtgcaatgactcgcggtttatcatcggtcagcgttgccagtagttcatccagtgcttcaatatcgcgtacgcgccccactggatgcttgatttcgttggctcgctccagtgcctgactcaacacttcatagccgccgcgcatgttcagctttgggcttacggtaacccaggtattcggtgtgcagcgtacctcatgagtaccactggtttcgatctggcagctaaaaccgttcttttcgagcagatcagtcagtggcagcaaatcatgaatgcaaggctcaccacccgtaatcaccacatgccgcgcggtgtatccctggcgaccaatgacagccagcaaatcttcactgctcgcagccccccacttatcactctctttggtcttcgccagaatgctgaaaagggagacttcccgatcctcaagcttttcccaggtgtgtttggtgtcgcaccaggcacagccaaccgggcatccctgtaaacgaataaaaatggcgggaacgccggtaaagtaaccctcaccttgcagggtctggaacatctcgttaatcgggtactgcatagcattctctgtgaagtggataattgttaattattgcagatcctgccacaacaatcatgtcttattaacattctgttacaggcaggtttaaagaaaaatgcgaaacatatcgttaataattaaagggagtaacgtattatgtcagaagaaaataaagaaaatggatttaatcatgtcaaaacattcaccaaaattatatttattttttctgtattagtttttaatgataacgaatataaaattaccgatgccgccgtcaatttatttatccagatttaatgagaaatttataatgcgctatttcatactaatgttcactttcgtatgttcctttgttgcagcccaaccaactattgtcccacaattacagcaacaagttacggatcttacgagtagcttaaacagtcaagaaaagaaagaactgacgcacaagttagaatctattttcaataatacccaagtgcaaattgccgtattaattgttcccacaaccaaagacgagacaattgaacaatatgctacaagagtttttgacaattggcgtttaggagatgccaaacgtaatgatgggatactgatcgttgttgcctggagcgatcgcactgtccgcatccaggtaggttatgggctggaagaaaaggtaaccgatgctctggctggagatatcatccgtagcaacatgatacccgcatttaaacaacaaaaattagctaagggattagagctagctataaacgctttgaataaccaactcactagtcaacaccaatatccgactaatcctagtgaaagtgaaagtgcgtcttccagtgatcattattactttgctattttttgggtatttgcagtgatgttcttccctttctggttttttcatcaaggcagtaatttttgtcgcgcatgtaaaagtggagtctgtattagtgcaatctatcttttagatttattcctgttctccgataaaattttttccattgctgtattttccttcttttttactttcaccatatttatggtctttacctgtttatgtgtacttcagaaaagagcatctggtagaagttatcatagtgacaacagcggttccgctggaggcagtgatagcggcggatttagcggcgggggcggttcttctggaggtggcggcgcatccggccgctggtaactcaaccataaaaaatgccagcccggaggctggcatttttaaatcagataaagtcagtcttatgcctggcctttgatctctttacgaccgttgtacggtgctttttcgcccagagcttcttcgatacgaatcagctggttgtatttagcaacacggtcagaacggctcatagaaccagttttgatctggcctgcagcagtaccaacagccaggtcagcgatggtagcgtcttcagtttcgccagaacggtgagagataactgcagtgtagccagcatctttcgccatcttgattgcagccagagtttcggtcagagaaccgatctggttgaatttgatcaggatggagttagcgatacctttttcgataccttctttcaggatcttggtgttggttacgaacaggtcgtcaccaaccagctggattttgtcgcccagaactttggtctggtatgcgaaaccgtcccagtcagattcgtccagaccgtcttcgatagaaacgatcgggtactgtttggtcagttcttccaggaagtgagtgaattcttcagaggtgaacgctttgttgccttcgccagccagaacgtatttaccatctttgtagaattcagaagctgcgcagtccatcgccaaagtgatgtctttgcccagttcataaccagcagctttaacagcttcagcgataacagccagagcttcagcgttggaacccaggttcggcgcatagccaccttcgtcaccaacagcagtgttcatgcctttcgctttcagaacttttgccaggtgatggaaaacttcagaacccatgcggatggcttctttcacagttttcgcgccaaccggctgaatcatgaattcctggatatcaacgttgttgtcagcgtgctcaccaccgttgatgatgttcatcatcggaaccggcatagagtatttgcccggagtaccgttcagttcagcgatgtgctcgtacagcggcatacctttagcagctgcagcagctttggcgttagccagagatacagccaggattgcgttcgcgccgaatttggatttgttttcggtgccgtccaggtcgatcatgatcttgtcaatgccagcctgatctttagcatctttgccaatcagcgcctgagcgatcgggccgtttaccgcagcaacagctttggttacgcctttacccaggaaacgggatttgtcgccatcgcgcagttccagagcttcacgggaaccagtagaagcaccactcggagcagctgccataccgacgaaaccaccctccagatgtacttcggcttcaacagtcgggttaccacgggagtcgatgatttcacgaccgatgatttttacgattttggacattaggttttcctcaagtcactagttaaactgaaactccagacaaacaacgcgtacccagggtacgcgttgccgctctaacttttttacttacttcgcctgacgtttctggaactcgctggcggctttcacaaagcctgcaaacagcgggtgaccatcacgtggagtagaagtaaactccggatggaactggcaagccacgaaccacgggtgattcggaacttcgatgatctcgaccaactgatcatccccggaacggcccgcaacgcgcagacctgcatcttcaatctgtttcaacagcatgttgttgacttcgtaacggtgacgatgacgctcaacaattgtcggcgcattgtacagctggcgaaccaggctatcgtcaaccaactggcactgctgtgcgccgagacgcatggtaccgccgagatcgctcttctcgctacgaacttcaacgttgccgttttcatcgcgccactcggtaatcagcgccacaaccgggtacttacagtctggcacaaattccgtagagttggcgttctccatgttggcaacatggcgagcgtaatcaattaacgccacctgcatacccaggcaaatgcccagataaggaatattgttctcacgcgcaaaacgcgcggtcgtaatcatgccttctacgccacgatagccgaaaccgccaggtacgaggattgcgtccagacctttaaggatttcaacgccgcgcgtttcaacatcttgactatcgatcagtttgatgttgacgctgacacgattcttcagcccaccgtgtttcagtgcttcgatcacacttttataagcatccggcagttcaatgtacttgccgaccataccgatggtgacttcacttaccgggttcgcttcttcgaagataacctgttcccattcggacagattcgcttccgggcagtttaagctgaatcgtttacaaatataatcgtccagcccctgagatttcaacaggcccggaattttatagatggaatcgacgtctttcagagaaataaccgctttttccggaacattacagaacaatgcaatcttcgcacgttcgttcgccggaacagcgcgatcactacgacaaatcaggatgtcaggctggataccgatggagagcagctcttttacagagtgctgagtcggtttggttttgacttcaccagacgctgccatgtacggcaccagcgtcaggtgcataaacagagtgtgctcacggccaatttcaacagccatctggcgaatcgcttcgaggaacggcaaggattcgatatcacctactgtaccgccgatttctaccagtactacgtcatgaccttcgccaccttccagcacgcgctctttgattgcgttagtgatgtgcggaataacctgcacggttgcgccgaggtagtcaccgcggcgttctttacgcagaacgtcagagtagatacgacccgtggtgaagttgttgcggcggctcattttggtacgaatgaaacgctcgtagtgccccaggtccaggtcggtttcagcgccgtcttcagtaacgaacacttccccgtgttggattgggctcatagtacctggatcgacgttgatgtacggatccagtttcatgatggtcacattgaggccacgggcttcaagaatggctgcgagggaggctgcggcaatgcctttacccagagaggatacgaccccgccggtcacaaaaatatagttcgttgtcatgctgaacctgagaagttaggttgaaaagacgatggaataaccaagacgggaaagcagtatacccgaacatgacctgtgccacaaactttcattatccctcctcttcgccagcgcactattgaaatcaggagtgagaaaatagcccctttggggtaaatgtttttgacgcaaatcaagcgcttgtcatttaaaaaatgacacaaatggcgcttgaccgcgtaattcccttagagatcaatttcctgccgttttacctgttgccagacttcttccattgtttcgaggtcaacacctgtcatttccagtccacgcgcggcaacaatacgctccacttcgcgaaaacgacgctcgaatttttcgttcgctttttgcaatgcgatttctgctttcgtccctaaatggcgagccagattaaccgtggcaaacagcaggtcccccatttcctcctccagtttagcctggtcgacaacagcctgccgcgcttcgtacatcacctcgtcgatctcttcgtagactttatcgactaccggaccaagcgtcgtccaatcgaagccaacgttggcgcaacgtttctggattttttgcgcacgcattaaagccggtaaactacgaggaatatcgtccagcgcgctatgctgcgctttctgcgcgcgctcttcggttttgatttgctcccaacgggcaagcacttcactactgttttcggcagaactatcagcaaaaacatgcggatggcgacgctctaatttatcgctaatagcagcgcaaatatcattaaagtcaaagcgcccttcttcctgagccatttgcgcgtaaaacaccacctggaatagcagatcgcccagttcaccgcgaagatcgtcaaaatcttcacgggcgatggcgtccagcacttcgtaggtttcttcaagggtgtaaggcgcaatggtggcaaatgtctgctctttatcccacgggcagccgttttccggatcgcgcaggcgctgcataatagtgagcaaacggtcgatttgattcattgaattgtcctgaaaattgcgggtctgtcaggtggaaacctgtgaccagaatagaagtgagttagtaacattacccaatcagtacgttaattttggctttaatgagttgtaattcctctggggcaactgttcctttcttcgttgctcctcttgcccgccaggcgatactttttacctgatcagctaacgctacgccatcacgttcctgaccggataaaacaacttcgaacggatatcctttactttgcgttgtacaaggaacacacagacacatacctgttttgttgttgtacatgaaaggactcaggacaacagctggacgatgtccagcttgctcgctaccttttgtcgggtcaaaatcaacccaaatcagatcgcccatatcgggtacgtatcggcttaccattaccagacttccttatctttcggctctccccagtcgatattctcgtggaggttttccggcgtgatgtcgttgaccagttcagcaagcgtaaatacgggctctttacgcactggctcaataattaatttgccatccaccaggtcaatcttcacttcatcatcaatattcagattgagcgcctgcattaacgtagccgggatccgcaccgccggactatttccccaacgctttacgctactgtggatcataaccctttcctcaaaccgctatcatatgtagatacagtatatatcaatctacattgtagatacgagcaaatttcggcttaactcccgtgcaaccgacgcgcgtcgataacatccggcacctggttgagtttacccagcacgcgccccagcacttgcaggttgtaaatctcaatggtcatgtcgatggtcgccagttgctgtttggtgtcgctacggctggcaacgccaagcacgttcaccttctcgttggcgagaatggtcgtgatatcacgtaacaacccactacgatcattagctaccacgcggaccaccaggctatatccggcggagtagctctcaccccataccgcgtcaacaatgcgttctggcgcatgggagcgcagttccgccagttgttcgcaatcggcgcggtgtacactaataccgcgcccctgggtaatgaagccgacaatctcatctccaggaatcggctggcagcagcgcgcgatgtggtgcatcaggttgccaacaccttcgactaccacgcgaccgttatctttactgcggttttgcggcgtgtagcttttttgctgaagttgcttcagcgcggcggcgtcctgctcttcggcactcggcttattaaattggctttgcaggaagttcaccatctgattgagacggatatccccgccaccaatcgccgccagcaactcgtcgacatcattgaagttgtaacgcggcagcagatgtttttctgcttctttcaggctgatccccagatgttccagctcgtcgtcaaggatttgccgcccagccagaatgtttttgtcacggtcctgtttacggaaccaggcgtgaattttgctacgcccacggctggttgtgacgtaaccgaggtttgggtttaaccagtcacggctggggttcggctgtttctgggtgataatttcaatctggtcgcccatctgcagctggtaggtgaacggcacaatgcgcccgccaatttttgccccgatgcagcggtgtccgacatcactgtggatgtggtaagcgaagtccagcggcgtacttcccgcaggcaaatcaacgacatcacctttcggcgtaaagacgtacacccggtcgtcaaagacctgactacgtacttcgtcgagcatttcgccggaatcagccatctcttcctgccacgcaatcagtttacgcagccaggcaatccggtcttcatgtccgctacgtgcgccgccagcagccgcgccctctttatatttccagtgcgcagcaacacccaactctgcatcttcatgcatctgtttggtgcggatttggatctcaacggtttttccacccggccccagaaccacggtatgaatagactgataaccgtttggtttcgggttagcgacgtaatcgtcaaactcatccggcaggtggcgatagtgagtgtgcactatccccagtgcggcatagcaatcctgtaaacgctcggcgacaatacgtaccgcacgcacatcaaacagctcatcaaaggcgaggttctttttctgcattttacgccagatgctgtagatgtgtttcggacgaccatacacttccgctttaacgccttcagctttcatctcagcgcgcagatgaccaacgaactcttcgatgtagtgttcgcggtcgagacgccgttcatgcagcagtttggcaattcgtttgtattcggttggatggaggtaacggaagcagtaatcttccagttcccatttcagttgtccgattccgagacggttagccagcggtgcgtagatgttggtacactcttttgccgccagtacacgttcatcttccggcgcatcttttacttcgcgcagatgagcaatacgctccgccagtttgatgactacgcagcgaaaatcatcgaccatcgccaataacatccggcgaacgttatcgacctgttcggaggaaacagaatcagtgtgcgtcgctttcagctggcggatcgccgccatatcacgcacgccgtgaataaggttaacgacgctcttaccgacgctctcacgcagcacatcttcgctgactacgttggcatccgccagagggaaaagcagcgccgcccgcagcgtgtcaatgtccatacttaatgtgctgaggatctccaccatctcaacaccacgccacaataacagactggcatccggatgcccctgcgtctgttgcagacaatacgcccaggtttcggctaagcactcacagctcttctggctggtaatacccagacttgcgatccatttttccggatcaaattcaccagccttattgatatgtgcacttcttaccgcaaccatcgtcctctcctttagggaccagacctgccgaaatcggcaaatcgcaattatttaacgcggctgaaaagtaccatgctttccagatgtcccgtgtgtgggaacatatccagcatcgccagtcgcgcaatggtatatcctgcttttaataacgcttcgctatcccgagccagcgttgcagggttacaggatacataaactatacgaataggttccagttttataatttgctgcataacacctgcggcacctgctcgcgccgggtccagcaacactttatcgaagccgtttttcgcccacggctgctttgtgacatcttcttcaagattttcgtgataaaacgtcacattctgtaagccattaagacgcgcattctgctggcctttttccaccagcgccggaacaccttctacaccgaccacactggcagcttgtgtcgccaatggcagtgtaaagttgcccataccgcagaacagatccagtacgcgatcttcaggttgcacatccagccattccaacgcacgcgctaccattttttggttcacacccgcattgacctgaataaaatcgcgcgggctaaaagttaagcgcaacccgttactgtcataccagggcatctcaccagagacggtttcgagtatctcactatcgggggcgagatacagatccaggccttcagaatggctaaagcgttccagtttttcgcgatctgcgctacttagcggtgcggtatggcgcaaaatcatcagcgtgccgctggttgcctgtaccagttcaacatgaccaagatggcgcatagcttgtaagctgcccagacatgccctgactttgggcagcaatgcttcaagttggggcgctaaaatggggcattgtttgacgtcgacaatgtcactggagcccgctttgcgaaaccccatctgaagttgctgtgttttcggtaagtagttcagacttaaacgcgcgcgacggcgatagccccagggaacatcggcgatcacttcagagacatcgtgtttcattaatcgggcgagtgccgcacttttgcttcgctgctgtaaatccacgctggcgtgttgttgctgacagccaccgcatacgccaaaatgaggacagcgtggcgtttcgcgttccgggctatcgcttaaccggcgtacgactttagcgcgggcatactgttttttatcttcagtaacagtaacttccgcgttttcctgcggcaataatccggggataaatagcgttttgccgttatgtcgcgccacgccctgaccaaaagagtcgaggtcgttgacactaacggttatgatctgacgcgtcgtcgtgcgtcgttttgcagagtagaattgcgccattggcgagactttctcaatttaacagtgtgaccttaattgtcccataacggaactccatgaccaactacagcctgcgcgcacgcatgatgattctgatcctggcaccgaccgtccttattggtttattgctgagtatctttttcgtcgtgcatcgctataacgacttgcagcgtcaactggaagatgccggtgccagcattattgagccgcttgcagtttctactgaatatggcatgagcctgcaaaatcgcgaatctatcggtcagttaataagcgtactgcatcgtcgccattccgatattgttcgcgcgattagcgtttatgatgaaaataaccgactctttgtcacctccaattttcatcttgatcccagtagtatgcagctcggcagcaacgtgccgtttcctcgccagctcactgtcactcgtgacggcgatattatgatcctccgcacgccgattatttctgagagttactcccccgacgaaagccccagtagcgatgccaaaaatagtcaaaatatgttgggatatattgcgctggagctggatcttaaaagcgttcgcttgcagcaatataaagagatctttatttccagcgtgatgatgctgttttgtatcggtattgcgcttatttttggctggcgcttaatgcgcgatgtaaccggtccgattcgcaacatggtgaataccgtcgaccgcatccgtcgcgggcaactcgacagccgggtggaaggatttatgctcggcgagctggatatgctgaaaaacggtatcaacagcatggcaatgagcctggctgcttatcacgaagagatgcagcacaatatcgaccaggcgacgtccgatctgcgtgaaacgctggagcagatggaaattcagaacgttgagttagatctggcgaaaaagcgcgcccaggaagcggcgcgtattaaatccgagtttctggcaaatatgagtcacgagctgcgtacaccactgaatggtgttattggctttacccgcctgacgctgaaaacagaattaacaccaacgcagcgcgatcacctgaatacgattgaacgtagcgcaaataatttgctggcaattattaatgatgttctcgacttcagcaaactggaagcaggtaagctgattctggaaagtattccattcccactacgcagcacgctggatgaagtcgttactctgctggcacattcttctcacgataaagggttagaactgacgctcaatattaaaagcgacgtgcctgataacgtgatcggcgacccgctgcgattacagcaaatcatcactaacctggtggggaatgcaattaaattcaccgagaatggcaacattgatattctggtagaaaaacgtgcgctgagtaataccaaagtgcagattgaagtgcagattcgggataccggcattggtattcctgaacgcgatcaaagccgcttattccaggccttccgacaggctgatgccagtatttcccgccgtcatggtggcaccgggctggggctggtgattacacaaaaactggttaatgaaatgggcggcgatattagcttccatagccagccgaatcgcggtagtactttctggttccacattaatctcgatctgaacccgaacattattatcgaagggccatccacccagtgcctcgcaggtaagcgcctggcctatgtcgaaccaaactccgcagcagcgcaatgcacgctggatattttaagtgaaacgccgctggaagtggtttatagcccaacgttctccgcgctgcctcccgcgcattacgacatgatgttgttaggcatcgcggtgaccttccgcgagccgctaacaatgcaacatgagcgattagcgaaagcggtaagcatgaccgatttcctgatgctggcacttccttgccatgcacaagtcaatgctgaaaaactcaagcaagatggtatcggcgcgtgtctgctgaaaccattaacacctacacgcctgttgcctgccctgacggaattttgtcatcacaaacaaaacacgcttttgcctgtaaccgatgaaagtaagctggcaatgacagtcatggcggttgatgacaaccccgctaacctgaaacttatcggcgcattgctggaagatatggtgcaacatgtggaactttgcgatagcgggcatcaggcggttgaacgggcgaaacagatgccgttcgatttgatcttaatggatattcaaatgccggacatggatggcattcgggcctgcgaactcatccaccaactcccgcatcagcaacaaacgccggttatcgcggtaacggcgcatgcaatggccgggcaaaaagagaagctgcttggcgcagggatgagcgattatctggcgaaaccgattgaagaagagcgattgcataatttgttgttgcgctacaagcctggcagcggtatttcctctcgcgtcgtgacgcccgaagtcaacgaaattgtggtgaacccgaatgcgaccctcgactggcaactggcactacgccaggcagcaggaaaaaccgatttagcgcgcgatatgctgcaaatgttactcgatttcctgcctgaagttcgcaacaaagttgaggaacagctggttggagaaaacccggaaggcctggttgatttgattcataaactgcatggcagttgcggctatagcggtgtgccacgtatgaagaatctctgccaactgatcgaacaacagctacgtagcggtactaaagaagaagatttggaaccggagctgctggaactgttggacgagatggataatgtcgcgcgcgaagccagcaaaattctcgggtaatggatgtcttgtcgagtagcaatcggctttttatgacgctggtttcagattggtgacaaagtgcctgtgtttatgccggatgcggcgttaacgccttatccggcctacaaaaccaattaaattcaatgaattaaaaaatgatgtagacctgatacatagcacaacaggctattttgcgtttagcatcagtctcaaaccggctccagatagagccggttttggttttctgtcttaacgcaccatgcacgggcgcttgttatcgaacgtccagccaggaatcagatactgcattcccatcgcatcgtcacgcgcgccaagcccgtgtttctgatacagctcatgggctttcatcacttgatccatatcgatttctacacccagccccggtttttctggcacctgtaccagcccgcctttgatctcaaacggttctttggtcaggcgctgattgccttcctgccaaatccagtgcgtatcaatagcagtaattttacccggtgcagcggcggcaacatgggtaaacatcgccagggaaatatcgaagtggttgttagagtgactaccccaggtcaggccaaattcatggcacatttgcgccacacgtacgctaccttgcattgtccagaaatgcggatccgccagcgggatatcaacggattgcagggagagcgtatggcccatttgccgccagtcggtggcgatcatattggttgcagtcggtagacctgtcgcgcgacggaactctgccatcacttcacgcccggagaaaccttgctccgcaccacacggatcttctgcataagccaggctacctttcaggtatttaccgattttaatcgcttcgttcaggctccaggcaccgttaggatcgagcgtaatacgcgcctgcgggaagcgttgcgccagtgccacaatagactcggcctcttcttccccggccagtacaccgcccttcagtttgaaatcgttgaagccatatttttcatatgccgcttccgccaggcgcaccaccgcatccggcgtcatcgcttcttcatgacgcaggcgataccagtcgcaactgtcatccggctggctttgatacggcagcggcgtggctttgcgattaccgacgaagaacagataaccgagcatttcgacttcgctacgctgttgaccatcgcccagcaggcttgccacgtttacccccagatgctgccccagcagatccagcattgccgcttctatcccggtaactacatgaatagtggtacgtaggtcaaatgtctgcaaaccgcgcccaccagcatcacgatcggcaaaagtattacgcaccagcgtcagaacgtttttgtattcacccagcgttttacctaccaccagcggaatcgcatcttccagcgttttacggattttctcgccgccgggaatttcccctacgccagtgtgaccagaattatctttgataatcacaatattacgcgtaaagaacggtgcgtgtgcaccactcagattcatcagcatactgtcatgacccgccaccgggataacctgcatttcagtaacaacaggcgtcgtaaattgagaactcatatttatgtcctttttcagaatcaatgacggccgaaaacgggacgtttacggtcaaaggtccagccggggatcaggcactgcatcggacctgcgtcgttacgcgcaccgccaggcagacgtttataggcctcatgtgccttttgtacctgttcccagtccagttccacgcccagaccgggcgcatcaggaacggcaatttttccgtttttaatctccagcggattttgggtcaggcgacaatcgccctcctgccaaatccagtgggtatcgatagcggtaggattacccggtgccgccgcgcccacatgggtaaacatcgccagagagatatcgaaatggttattagaatggcagccccaggtcagcccccagtcgtcgcaaagctgcgccacacggactgcaccggaaagcgtccagaagtgcggatcggcaagtggaatatctaccgcattgagcatcaccgcatgacccatttcgcgccagttggtggcgatcatgttagtcgcgacgggcaagccggtcgcccgtcgaaattccgccatcacttcacgtccggagaagccctgttctgcgccgcatggatcttcggcataggtaagaacatcattcagccctttgcataaagaaatggcttcatcaagcagccatgcaccgttgggatcaacggtaatccgcgcatccgggaagcgtttcttcaatgcacgaacagtgtcgatttcttgctcgccaggtaacacgccgcccttaagtttgaaatctttaaagccgtagcgatcctgactggcttccgccagacgcacaacggcttcgctgttcattgctttctgatgccgcaactgataccactcatggttgcccggcgtattttccacataaggaagatcggttttggtccgatcaccgatataaaacagataaccgaggacggtaatagcctcgcgttgcttgcctggccctaacagttcgcagaccggaacattcagcgccttacctagcaggtcaagcaaagcggcttccagcgccgccacggcgttaacgcgtaattcaaaggtccaggcacctttaccgaaggtatcaaaatcggcggcctgattacctttatgcacctgctggaccactttattcagtcgcgcaacttcctggcccagaaccatcggaatagcatcgacaagcgtctgataaatcacatctccgcccggcgcttcaccaatgccggtatgcccggcgttatcggtgagtaccacaatattgcgggtgaaatatgcgttatgtgccccaccaatattaagcaacatgctgtcatgcccggccaccggaatgactttcatatcagtaataacaggactggattgtgtcgccatcttattgccccgcaacaggtttcaactcgatacgcttgatatcgcccaccagcaccaggtagctcagtaccgcgattaaggcatgaacaccaacataaatcagcgccccattaaagctgccagtcgtgccaacgatataaccaattgcgattggcgtgacgatgccagaaatgttaccgaacatgttgaacaggccaccggaaagaccgctgatctcttttggcgcggtatctgccattactgcccaacccagcgccccgatgcccttaccgaagaaggccagcgccataaagccgatgatcatccactcaacgttgacgtagttgcagaacaccatcaccatgctcagcaacatgcccattacgatcggtgttttacgcgcaatgttcaggcttcccgtgcggcgcatcagccagtcggaaataatcccacccagcacaccgccgataaaaccgcaaaccgccggaacggaagccacaaagcccgctttcagaatgctcatcccgcgtgcctgcaccagataaaccgggaaccaggtaataaagaagtaagtcagggcgttgatacagtactgaccgatataaacgccgatcatcatccgactccctagcagctgtttgatctgcccccacttcacgctgaacggcactttaactttggtgttttgctgatccatattgatcagcgcaccacccgcggcgatgtactccagctctttcttatttacccccggatgttgatttggctcgtggatgactttcaaccagataaagctgatgacaatccccagaccgcccataaagaagaagacgtgactccagcccacttcatgcgtcagccagcccataatcggcgcgaagatcaccgttgcgaagtattgagcggagttaaaaatgctcaccgccgttcccctttcctgcgccggaaaccaggccgcaacaatgcgactgttgccggggaaagatggcgcttcagcaagcccgaccaggaagcgcagcgtaaacagggcaacgataatgccgaatccactaaagatatcgacgaagccttgcagcaaggtaaacatgctccagataaagatgctccagaagtagacgcgtttactaccaaaacggtccagcaaccagccaccagggatctgcccgataacataagcccaactgaaagcagagaacacatagcccattcccacgggatcaaggccgatatctttggccatttcgctaccggcgatagagagcgtagcgcggtcgccgtagttgaaggatgtgacgataaacaacatcaccactatccagtaacgagcatttgtgcgtttttccacactgctcgcagcctgacttaaagaactcattgttgcactcctgaaaattcgcgttagccacgctcactctggactgcgacatcgccaggaaatcagaggtgacgtagggtgttttttgccgtttttataggtcgttcgccgaatacggcgcgtgtttatatctggcaatagcagtataaaaagcgcgccatagcggctcaccgtgcaacaacacaacattaatgcgttcaatgaggcccgattttggcattagccctggacggtggaatccacttcacggaaatgaaaacaagaacaagaaaggaagggttaaaacgaagaaataaagaagagtatgaaatggatcgcttgactccaggcaaacgccagtaaaaatccgcgctatgaagcagtttttactggcatttgcctgaaaagattcgattcagcaccgctaaaacgacatttaccgctcgctgaacatatcaggacaacagcgtgccccactgttcgacccacggattactttccgtttccggttccgggttctcactggcgtcaatcaacagcatttcgccaacccgctgagcgctctgttcctgcaacaaggcatcgaactgtttgccgccattgcagaaattcacataactactgtcgccgagcgcaatcacgccataacgcagattcggctggaagcccagactatctttgattccctgaaagagtggcacaatgctatcaggaaggtcgccctgcccggtcgtggacgtaaccaccagaacatacttatcctgatagggcagccagtcgcttaattcaggatcttcaaataccgttgctttgtggccctgcgcggtcagaatcgcttccgcttcttcggccactaacagactattcccgtacatggtgccgacaaaaataccaatttccgccataccgttttctccctggattaggaacttatctctccatcctgaccgcttggcgcactgaactcaaccctttcattttcaggaagcagaccgcgccagccaaattgacttaacgcctgcatccaggtgtcgtccaggcccgcgtgaatagtcagcggctcgccagtaaaaggatgcgtcaaactcaactgactggcatgtagcattaaccgctggaggccaaaatgctcagcaccgctgcgattctggcgtaaatcgccatgtttgctatcgccaataatcggatgacgcaaatgggcaagatgtcggcgaagctgatgtttgcgtccggttttcggctccagttccaccaggccgtagcgcgtggtcgggtaacgtccggtcgctaccggcatttctacggtcgccagaccgcgataatgcgtcactgctggctgcgggcctttatcttcgcgggcaaatttatcagcgattttgtccagttcttccaccagtggataatccagcaccgcttcttccatcaaccagccgcgcacaatcgcatggtaacgtttctggatttggtgctgttcaaactgttgtgccagcagccgtccggcctcgctggataatcccatcaacaacacaccagaagtgggtcggtccagacgatgagcagtaaaaacatgctggcctatctggtcacgcacggtttgcatgaccactactttctcgtcgcgatccagccagctgcggtgaaccagccagccggagggtttatttaccgcaaccagccattcatcctgatagagtatttccagcattagctcgcatcatccgcaaaaagagcatccagtttttccagctcagccagaataagcgcgcgttgcggatggtccgtcgccagcgccatttcataatagggtgcaacggcaaaagcgcccggtaacggctgtttgttatctaacaaatcgtgcattcgcgggatcagcacccactgcaaccactccagtggttccatggtgtccataaagaacggttgggtactattaaattgatgcggctggggttcatcgtttcgccagtgctgatgttcacgcagtaacgcttcaagcgcctgcaactggagacgaacgcggtcatgagtggtcataaagcaacctcaataagaaaaactgccgcgaaggatagcaggaataaaaaaagggagcactgtattcacagcgctcccggttcgtttcgcagcattccagctacttttgttgctccctgctcatccttgacaacttttcctctggccttgcggccaatcgttcatcctgaactattgcttcctgctcacaccaccccgatgtgatacttcatcctgaagtgtccctggccttcctgacccaccgaatcatcctgaccggttctcattctccatcctggaggtgtcctttaacgcgtcctgcgtcatcctcttcgcttcatccagaagcctttccctgaaacaccatcctggtgtgtcctgcagaagtgtcatcatcctgatgttcacttcgttgtctgactccctgtcgacgaagatagaatcgtctttttcgcgaagtcttacaaggcgcttacagacaatgccttaaggaaaatttcatatgaaagttaagaattaacaatcaacattttgattttaaatgaaaataacgattcttatctttttaagtattcgcttatttcctggcgatctcctacagagtctgtaagagatctctcacaaccagatggggtatttggattacagaagaggcttaagttgattaaggaattccgcaagattactggctaaatgcgtccgtttacgtgttcccagcgtctctttgcacacttcaccggagagattacacacgctgatgacctctaactcttcttccagcgtcgcgataaatagtgtgggcggcagttttagccttttctgagtcaccagatgaccaatcagattttcctgcacccgacggaagtcgtcttcactccaggtttgcagcaatgtcagtttgatatcgccaaactgcgcgtgcatatccccggcaaactgagtcgtataaaaggtatgaattgtgggttgtatcacaatatcaaaagcgcgttcaaccgcgtttacattttgttccccggtaaacggctggggttgccagtatacggcatcttcggtagtactaataatgcacggactaggaacaccgtacagttcctcacttaacggccagcttttatgctcttcatgccacgcatcgcagtagcgtgcagtaaaatctttcagggcttgtgcggtcaaatcgtccactaatttctctcttcacttaaaccagatacacttgtcgtttagtttatctggtttatgacggtgaaacatgtcttcttatgcaaaccatcaggcacttgcgggcctgactcttggaaaaagtaccgattaccgggatacctatgacgccagcctactgcaaggcgttccacgcagcctgaatcgcgacccgctgggtctgaaagcggataacctgccttttcacggtacggatatctggacgctgtatgaactttcctggctgaatgcgaaaggtttgccgcaggtcgctgtcggtcatgttgaacttgattacaccagcgtaaatctgattgagagcaagagttttaagctctatctcaacagttttaaccagacgcgttttaataactgggatgaggtgcgccagacgctggagcgcgacttaagcacttgcgctcagggtaagattagcgtggcgttatatcgtcttgatgaactggaaggccagccgataggtcattttaatggcacttgcattgatgaccaggatatcactatcgataactatgaattcactactgactatctggagaatgccacctgtggtgaaaaagtagtggaagagacgcttgtcagccacctgctgaaaagtaactgcctgatcacccatcaaccagattggggtagcctccaaattcagtatcgtggacgccaaattgacagagaaaaactgctgcgttacctggtcagtttccgtcatcacaacgagttccacgaacagtgcgtggaacgcatctttaatgacctgttacgcttctgccagccagaaaaattgagcgtttacgcacgttatacccgtcgtggcggtctggacattaacccgtggcgcagtaatagcgattttgtcccaagcaccacaagactggttcggcaataaatttttctcaattttgcgtgctggattcacgcagaaggttgtgaaaggtcatcaggcagggctattgtaatcaaagggaatgacgatattcgtcccataaggagtttttcttgattacacatattagcccgcttggctccatggatatgttgagccagctggaagtggatatgcttaaacgcaccgccagcagcgacctctatcaactgtttcgcaactgtagtcttgccgtactgaactccggtagtttgaccgataacagcaaagaattgctgtctcgttttgaaaatttcgatattaacgtcttgcgccgtgaacgcggcgtaaagctggaactgattaatcccccggaagaggcttttgtcgatgggcgaattattcgcgctttgcaggccaacttgttcgcggtcctgcgtgacattctcttcgtttacgggcaaatccataacaccgttcgttttcccaacctgaatctcgacaactccgtccacatcactaacctggtcttttccatcttgcgtaacgctcgcgcgctgcatgtgggtgaagcgccaaatatggtggtctgctggggcggtcacagtattaacgaaaacgagtatttgtatgcccgtcgcgtcggaaaccagctgggcctgcgtgagctgaatatctgcaccggctgtggtccgggagcgatggaagcgccgatgaaaggtgctgcggtcggacacgcgcagcagcgttacaaagacagtcgttttattggtatgacagagccgagcattatcgccgctgaaccgcctaacccgctggtcaacgaattgatcatcatgccagatatcgaaaaacgtctggaagcgtttgtccgtatcgctcacggtatcattatcttccctggcggtgtgggtacggcagaagagttgctctatttgctgggaattttaatgaacccggccaacaaagatcaggttttaccattgatcctcaccggcccgaaagagagcgccgactacttccgcgtactggacgagtttgtcgtgcatacgctgggtgaaaacgcgcgccgccattaccgcatcatcattgatgacgccgctgaagtcgctcgtcagatgaaaaaaagcatgccgctggtgaaagaaaatcgccgtgatacaggcgatgcctacagctttaactggagtatgcgcattgcgccagatttgcaaatgccgtttgagccgtctcacgagaatatggctaatctgaagctttacccggatcaacctgttgaagtgctggctgccgacctgcgccgtgcgttctccggtattgtggcgggtaacgtaaaagaagtcggtattcgcgccattgaagagtttggtccttacaaaatcaacggcgataaagagattatgcgtcgtatggacgacctgctacagggttttgttgcccagcatcgtatgaagttgccaggcagtgcctacatcccttgctacgaaatctgcacgtaatctccgctcccccggtgacgtttgttgccgggttttctcgtttttggtcacttactcatcaactcatttcatttgttatatgaatgtttctcaccaccctcacgcgacaaatatcatcacagttaatatgtcatacaatttatgttgcaacgcaaacgtttccctattttcataaaccgtattttatcgctatgaaaaagaaattatcgccatgattaactaaaagtattgattttttcagttcaacctacatatattgcgcgccccggaagaagtcagatgtcgtttaatgggcaaatattgcccttaaattctcttttacttttgatttacagagtaaagcgttgggataatctatcttccaagtagattattgtatttgagatcaagatcactgatagatacataacttgtgtgtatctttccgccctcaaattattacggcggtaaatgattaagccatcgccgatagacagatttcatttttacggtcaggcaccttcccgggctgaactggctaaaagctgaattatttgcattcctccaggagaaatagatggaaacgactcaaaccagcacgattgcgagcaaagactctcgtagtgcctggcgcaagacagacaccatgtggatgctgggcctttacggcacggcaatcggcgcgggcgtgctgttcctgccaatcaacgccggtgttggcggtatgatcccgctgatcatcatggctatccttgcgttcccgatgacgttttttgctcaccgcggcctgactcgcttcgtactgtctggtaaaaacccgggcgaagacatcaccgaggttgtagaagaacactttggtattggcgcaggtaaactgattaccctgctctacttcttcgctatctacccgatcctgctggtttatagcgtggcaatcaccaataccgttgaaagcttcatgtctcaccagctgggtatgacgccaccgccgcgtgcgattctgagcctgatcctgatcgtgggtatgatgaccatcgttcgcttcggtgagcagatgatcgttaaagcgatgagtattctggtattcccgtttgttggcgtactgatgctgctggctctgtacctgatcccgcagtggaacggcgctgcactggaaacgctgtctctggacactgcatctgcaaccggaaacggtctgtggatgaccctgtggctggcaattccggtaatggtgttcagcttcaaccactctccgatcatctcttctttcgccgttgcgaagcgtgaagagtacggcgatatggcagaacagaaatgcagcaagatcctggcattcgcacacatcatgatggtgctgaccgtaatgttcttcgtcttcagctgtgtactgagcctgactccggcagacctggctgcggctaaagagcagaacatcagcattctgtcttacctggctaaccactttaacgcaccggttatcgcgtggatggctccgattatcgcgattatcgctatcaccaaatccttcctcggtcactacctgggcgcacgtgaaggcttcaacggtatggtgattaaatctctgcgtggtaaaggtaagtctatcgaaatcaacaagctgaaccgtatcactgcgctgttcatgctggtaacgacctggattgttgccaccctgaacccgagcatcctgggtatgattgaaaccctgggcggtccaatcatcgcgatgatcctgttcctgatgccgatgtacgcaattcagaaagtaccggcaatgcgtaagtacagcggtcacatcagcaacgtattcgttgtcgtgatgggtctgattgcaatctccgcaatcttctactctctgttcagctaagtcctttcgcgccgctttcgggcggcgcttcctccgttttaacgcgatgtatttcctatgattagcgtattcgatattttcaaaatcggcattggcccttccagttctcataccgttggaccaatgaaagcgggtaaacaatttaccgacgatctgattgcccgtaacctgcttaaagacgtgacccgcgtggtggttgacgtgtacggcagcctctctctgaccggtaaaggccaccacactgatatcgccattattatgggcctggcgggtaacctgccggataccgtggatatcgattccatccccagttttattcaggatgtgaatactcatggtcgcctgatgctggcaaacggtcagcatgaagtggagttcccggttgatcagtgcatgaacttccacgccgacaacctttctctgcatgaaaacggtatgcgcattaccgcgctggcgggcgataaagtcgtttacagccagacttactactctattggcggtggctttatcgttgatgaagagcattttggccagcaggatagcgcaccggttgaagttccttatccgtacagtagtgcagccgatctgcaaaaacattgtcaggaaaccgggctgagtctctctggcctgatgatgaaaaacgagctggcgctgcacagcaaagaagagctggaacagcacctggcgaacgtctgggaagtcatgcgcggcggtattgagcgcggtatttccaccgaaggcgtgttgcctggcaaactgcgcgttccacgccgtgctgcggcactacgccggatgctggtcagccaggataaaaccaccactgacccgatggcggttgttgactggatcaacatgtttgcactggcagtgaacgaagagaacgctgctggcggtcgcgtggtgactgcgccgactaacggtgcgtgcgggattatcccggcagttctggcgtactacgacaagtttatccgcgaagtgaacgctaacagtctggctcgttacctgctggtagccagcgccattggttctctttataagatgaacgcgagcatttctggtgctgaagtgggttgccagggtgaagttggcgtggcgtgcagtatggcggcggctggtctggcagaactattaggcgcaagcccggcgcaggtgtgcatcgcggcggaaatcgccatggagcacaacctcggtctgacgtgtgacccggtcgccggacaggtacaggtgccatgcatcgagcgtaacgccattgcggcagtaaaagcggtgaacgccgcacgtatggcgctgcgccgtaccagcgagccgcgcgtctgcctcgataaagttatcgaaaccatgtacgaaacaggtaaagatatgaacgccaagtaccgcgaaacctctcgcggcggcctggcaatgaagatcgttgcctgcgattaatcgctctccaaaggcctcgttttgcgaggcctcttcccgatttctcatccagccgtagcctgttccggcatcgaatgttacccttatcgcctgatctttaagggggttatcgtggctgttcatttgcttattgtcgatgcactgaatcttattcgtcgcattcatgccgttcaggggagcccctgtgtcgaaacctgccagcatgcgctcgatcagctcattatgcacagccagccaacccacgcggtcgccgtttttgatgatgaaaaccgcagtagcggctggcgtcatcagcgtttaccagattacaaagcgggtcgaccgccaatgccggaagagttgcacgacgagatgcctgcattacgcgccgcctttgagcaacgcggcgtcccgtgctggagtaccagcggcaacgaagccgatgacttagccgccacgctggcggtcaaagtgacacaggccgggcatcaggcaacgattgttagcacagataaaggctactgtcagttacttagtccgacattacgtattcgtgattacttccagaaacgttggctggatgcgccatttatcgataaagaatttggcgttcaaccgcagcagttgcccgattactggggacttgcggggatcagcagtagtaaggtaccgggtgttgcgggaatcggaccaaaaagcgccacgcagctgctggtcgagtttcagagtctggaagggatatatgagaatctggatgcggttgccgaaaagtggcgcaaaaaattagaaacccataaagagatggcgtttctgtgccgcgatattgcccgcttacaaaccgatttgcatatcgacggcaatttacagcaattgcggttggtacggtaacggcgagccggatacgccgcaaacgtcgtatccggcattatcacatcagcgcatttaccaggcggtatggtaaagctctacaatatcctcaagcgttgcttcacgcgggttgccaccggtacaaacatcatccagtgccgcctgcgccagtgccggaatgtcttccttgcgtacaccaacatcacgcaaatgtggcggaataccgacatcacggttgagagcaaacaccgcttcaacagcggcattacgcgcctcttccaggctcataccttccactttcacgcccataacgcgcgcgatatcgcggtacttctcaccggtaaagtcagcgttataacgcatgacatgcggtaacaggatggcgttcgcaacaccgtgtggagtgttataaaacgcgcccagtggatgcgccataccatgcaccaaccctaacccaacattgctgaagcccatacccgcaacatactgcccgagcgccatttcttctccggcatccttatcaccagcaacgcttcctcgcagcgccccagcaatgatttcaatcgctttaatgtgcagtgcatcggttagcgcccacgcgccacgggtaatatacccctcaatagcatgagtgagcgcatcgacacccgtcgcagctttcagcgctggaggcataccatccatcatgtcagcgtcaataaacgccacctgcgggatatcatgcggatcaacgcaaacaaacttgcgccgtttctcttcgtcagtgatcacgtagttaatggtcacttctgccgcagtacctgctgtggtaggaattgccagaatcggtacactgggtttattggtcggggaaagcccttccaggctacgcacatcggcaaactccgggttgttgctgataatgccaatcgctttacaagtatcctgtggagaaccaccaccaatagcgatcaggtaatccgcgccgctattctggaatacaccgagcccttctttgacgacagtaattgttgggttgggcactacgccgtcgtaaatcgcccatgccagccctgcagcatccatcttatcggtcactttcgccaccacgccgcattgcaccagcgttttatcggtgacgatcagcgccttctgataaccacggcgtttcacctcatcggttaaagccccaacagcaccccgaccaaaccatgccgtttcgttcagaatcattctgttagccatcatccttctccttgttgctttacgaaattactcttcaattcgtaacccataggttttgaatttctccagcactacggcaatctcttcatcgctcagcactggcaccgggtccgtaatcgccagggtcgtcaggtaaagttgcgccagcacttcaacttcatgcgccagccataacgctttttccagattcacctcacaagcgataagcccatgatgttgtaacaaagttgccttacgatttttgagagccagcgcaacatgttcagaaagttcgcgtgttccaaaggtcgcataaggcgcgcaaggaatagaattaccgccagccgccgcaatcatgtagtgaatagcggggatgcttcggttaagaatggaaactgccgtgcaatgaacggcatgattgtgaacaaccgcgttggcatccggtctgctttgataggctgccatatggaaacgccattcgctactggggagctttccttcctcatgtttaccgttgccatcaataaagacaatatggctctccgtcagtttttcatatggaatgcctgtaggcgtaatcagcatcccatcctgataacgtacactgacgttccccgctgtcccctggttcagtcccaggcgggtcatttccaggcaagtgtcaataatctgacgagcaagtttatttcgttccattagctacctctctctgattcaaaacagggcaataatgttgttcctttcacactattgaattagccgtttaattacccaccatcttcttcctgattaacaagaaagaaattcacaagcttatattttgtgacctggttcaactaatcacagtaaataactgcaagttctctttttataaccccattaaaaatgaccgctcttaaaaatatttatcaaaacggtcatttttctattcctccaagcccggaatgaccgttttcggcacaaacaattaatacggtcatctgatttgtgttttttatgatttattttctgaaacgggcatgaaatttcgattattaaagtgatggtagtcacataaagtcaccttctagctaataagtgtgaccgccgtcatattacagagcgttttttatttgaaaatgaatccatgagttcatttcagacaggcaaatattcactgatatgaagcccgaactcgctggttttgcacttttgaaaacataaccgattacgtgcttaagcttctgaacctaagaggatgctatgggaaacacaagtatacaaacgcagagttaccgtgcggtagataaagatgcagggcaaagcagaagttacattattccattcgcgctgctgtgcagtctgttttttctttgggcggtagccaataaccttaacgacattttattacctcaattccagcaggcttttacgctgacaaatttccaggctggcctgatccaaagcgccttttactttggttatttcattatcccaatccctgctgggatattgatgaaaaaactcagttataaagcagggattattaccgggttatttttatatgccttgggtgctgcattattctggcccgccgcagaaataatgaactacaccttgtttttagttggcctatttattattgcagccggattaggttgtctggaaactgccgcaaacccttttgttacggtattagggccggaaagtagtggtcacttccgcttaaatcttgcgcaaacatttaacagctttggcgcaattatcgcggttgtctttgggcaaagtcttattttgtctaacgtgccacatcaaagccaagacattctcgataaaatgtctccagagcaattgagtgcgtataaacacagcctggtattaagcgtacagacaccttatatgatcatcgtggctatcgtgttactggtcgccctgctgatcatgctgacgaaattcccggcattgcagagtgataatcacagtgacgccaaacaaggaagcttctccgcaagcctttctcgcctggcgcgtattcgccactggcgctgggcggtattagcgcaattctgctatgtcggcgcacaaacggcctgctggagctatttgattcgctacgctgtagaagaaattccaggtatgactgcaggctttgccgctaactatttaaccggaaccatggtgtgcttctttattggtcgtttcaccggtacctggctcatcagtcgcttcgcaccacacaaagtcctggccgcctacgcattaatcgctatggcactgtgcctgatcagtgccttcgctggcggtcatgtgggcttaatagccctgactttatgcagcgcctttatgagcattcagtacccaacaatcttcagcctgggcattaagaatctcggccaggacaccaaatatggtagctccttcatcgttatgaccattattggcggcggtattgtcactccggtcatgggttttgtcagtgacgcggcgggcaacatccccactgctgaactgatccccgcactctgcttcgcggtcatctttatctttgcccgtttccgttctcaaacggcaactaactgaacatattttccgaataaagtgaggaatctgtaatgaaaaaaatcagcttaccgaaaattggtatccgcccggttattgacggtcgtcgcatgggtgttcgtgagagccttgaagaacaaacaatgaatatggcgaaagctacggccgcactgctgaccgagaaactgcgccatgcctgcggagctgccgtcgagtgtgtcatttccgatacctgtatcgcgggtatggctgaagccgctgcttgcgaagaaaaattcagcagtcagaatgtaggcctcaccattacggtaacgccttgctggtgctatggcagtgaaaccatcgacatggatccaacccgcccgaaggccatttggggctttaacggcactgaacgccccggcgctgtttacctggcagcggctctggcagctcacagccagaaaggcatcccagcattctccatttacggtcatgacgttcaggatgccgatgacacaagcattcctgccgatgttgaagaaaaactgctgcgctttgcccgcgccggtttggccgtcgccagcatgaaaggtaaaagctatctgagcctgggcggcgttagcatgggtatcgccggttccattgttgatcacaacttctttgaatcctggctgggaatgaaagtccaggcggtggatatgaccgaactgcgtcgccgtatcgatcagaagatttacgacgaagccgaattggaaatggcactggcctgggctgataaaaacttccgctatggcgaagatgaaaataacaaacagtatcaacgtaatgccgagcaaagccgcgcagttctgcgcgaaagtttactgatggcgatgtgtatccgcgacatgatgcaaggcaacagcaaactggccgatattggtcgcgtggaagaaagtcttggctacaacgccatcgctgcgggcttccaggggcaacgtcactggaccgatcaatatcccaatggtgacaccgccgaagcgatcctcaacagtagttttgactggaatggcgtgcgcgaaccctttgtcgtggcgaccgaaaacgacagtcttaacggcgtggcaatgctaatgggtcaccagctcaccggcaccgctcaggtatttgccgatgtgcgtacctactggagtccagaagcaattgagcgtgtaacggggcataaactggatggactggcagaacacggcatcatccatttgatcaactccggttctgctgcgctggacggttcctgtaaacaacgcgacagcgaaggtaacccgacgatgaagccacactgggaaatctctcagcaagaggctgacgcttgcctcgccgctaccgaatggtgcccggcgatccacgaatacttccgtggcggcggttactcttcccgcttccttaccgaaggcggcgtcccgttcaccatgactcgtgtcaacatcatcaaaggcctgggaccggtactgcaaatcgcggaaggctggagcgtggaattgccgaaggatgtgcatgacatcctcaacaaacgcaccaacagtacctggccaaccacctggtttgcaccgcgcctcaccggtaaagggccgtttacggatgtgtacagcgtaatggcgaactggggcgctaaccatggggttctgaccatcggccacgttggcgcagactttatcactctcgcctccatgctgcgtatcccggtatgtatgcacaacgttgaagagaccaaagtgtatcgtccttctgcctgggctgcgcacggcatggatattgaaggccaggattaccgcgcttgccagaactacggtccgttgtacaagcgttaatacattactccctgatgtgatgcccggtcgctccggctaccgggcctgaacaagcaagagtggttagccggataagcaatgttatccggctatattgcaggagcgattatgaaacaagaagttatcctggtactcgactgtggcgcgaccaatgtcagggccatcgcggttaatcggcagggcaaaattgttgcccgcgccagtacgcctaatgccagcgatatcgcgatggaaaacaacacctggcaccagtggtctttagacgccattttgcaacgctttgctgattgctgtcggcaaatcaatagtgaactgactgaatgccacatccgcggtatcgccgtcaccacctttggtgtggatggcgctctggtagataagcaaggcaatctgctctatccgattattagctggaaatgtccgcgaacagcagcggttatggacaatattgaacggttaatctccgcacagcggttgcaggctatttctggcgtcggagcctttagtttcaatacgttatataagttggtgtggttgaaagaaaatcatccacaactgctggaacgcgcgcacgcctggctctttattagcagcctgattaaccaccgtttaaccggcgaattcactactgatatcacgatggccggaaccagccagatgctggatatccagcaacgcgatttcagtccgcaaattttacaagccaccggtattccacgccgactcttccctcgtctggtggaagcgggtgaacagattggtacgctacagaacagcgccgcagcaatgctcggcttacccgttggcataccggtgatttccgcaggtcacgatacccagttcgccctttttggcgctggtgctgaacaaaatgaacccgtgctctcttccggtacatgggaaattttaatggttcgcagcgcccaggttgatactagcctgttaagtcagtacgccggttccacctgcgaactggatagccaggcagggttgtataacccaggtatgcaatggctggcatccggcgtgctggaatgggtgagaaaactgttctggacggctgaaacaccctggcaaatgttgattgaagaagctcgtctgatcgcgcctggcgcggatggcgtaaaaatgcagtgtgatttattgagctgtcagaacgctggctggcaaggagtgacgcttaataccacgcgggggcatttctatcgcgcggcgctggaagggttaactgcgcaattacagcgcaatctacagatgctggaaaaaatcgggcactttaaggcctctgaattattgttagtcggtggaggaagtcgcaacacattgtggaatcagattaaagccaatatgcttgatattccggtaaaagttctcgacgacgccgaaacgaccgtcgcaggagctgcgctgttcggttggtatggcgtaggggaatttaacagcccggaagaagcccgcgcacagattcattatcagtaccgttatttctacccgcaaactgaacctgaatttatagaggaagtgtgaaatgctgaaaacaattagcccgttaatttctcccgaactattgaaagtgctggcagagatgggacatggagatgaaattattttttccgatgctcactttcccgcccatagcatgggaccgcaggtgatccgcgctgatggcctgttggtgagcgacttgctccaggcgattatcccgttatttgaactggacagttatgcaccgccgctggtgatgatggcggcggtagaaggtgacactctcgatcctgaagtagaacgacgttaccgtaatgcgcttagtctacaagccccgtgtcctgacatcatccgcatcaatcgttttgcgttttatgaacgggcgcaaaaagcctttgcgatcgttatcacaggcgaacgagcgaagtacgggaatattcttttaaaaaaaggggtaacaccgtaatctcataccggtacgcccgcatgacgcgggcggttatcgaatgatggggtgaaaaatatgaaagcggcacgccagcaagcgatagtcgacctgctgctgaaccataccagcctgaccacggaagctctctctgaacagctaaaggtcagtaaagaaaccattcgtcgcgatctcaatgaattacagacgcagggtaaaattctgcgcaatcatggacgcgctaaatatatccaccgtcaaaatcaagacagtggcgatccctttcacatcaggctgaaaagccattatgcgcataaagcagatatcgcgcgcgaggcgctcgcgtggattgaagaagggatggtgatagccttagacgccagtagtacttgctggtatctggcacgccagttgcctgacatcaacattcaggtcttcaccaatagccatccgatttgccatgaactcggtaaacgcgaacgcattcaactgatcagttccggcggcacacttgagcgcaaatatggctgttacgtcaatcccagcctgatttcccaacttaaaagcctggaaatcgatctgtttattttttcttgtgaagggatcgatagcagcggcgcactgtgggactccaatgcgatcaacgctgattacaaaagcatgctattaaaacgtgccgcgcaaagcttgttattgattgataaaagtaaatttaatcgtagtggggaagcccgcatcgggcatctggatgaggtaacgcacattatttctgatgagcgccaggttgcaacttctttggtaacagcctgacggaaagggtagcaggccggagacgacgccccggccttgcctgttatcgctcgtcgcgacgaccacccaccgcagcccagatgcggcggacgtgcaccgtcacttcttcgcgatcgtgatacaactgccgcgcctgaatctgagcatttatgccatgttcatcaagctgtgcctgaatatacgccagattgtgactcacttcttcgtagcgttttttcatcggcagtttgaggttgaaaatggtttcacggcaccagccattaaccagccactgtgccatcaatgccgcaactttcgccggtttttcaaccatatcgcataccatccaggagatattgctgcgcgtcggacggaatttgaaaccgtcttcccgcagccacgtcacctgtccggtatccatcagactttgcgccatcgggccgttgtcgacggaataaacccacatgttgcgcttcaccagttggtaggtccagccgccagggcaagcgcctaaatccaccgcccacatcccgttcgccaggcgttcatcccactcatccgcaggaataaacacatgaaatgcctcttccagtttgagcgtggaacgactcggcgcatctgccggaaatttcaggcgcggaatgcccatatagaacgggctattattgttgctgtaactgtaaccggtatagcagcagcctggtgcaataaagaatacatgcacaaccggacgcttcggcgtttcatagttcgccagcaccccggcatcgcgcaaggcagcgcgtagcggaacagtaaatttacggcagaatttcagtaactctttgctttcgttggtatcggcaacttcaacacgcagttcaccgcccttctctactacgccctgtaacatgccgacaatgggggtaatacgatcttctggcggcaaatgctgcaggagttcccccaccacaaaccactggcgggcaaaaattaaactactgaacggcagctcacggattaacttatcgccatcatcaggttgataacattcataaatgacataacccgcattctctttcacgcgggcaaaaccgaaaatttcccgctggccggctttatcggtaatttctgcggcgcactctttttcaaagcccggacggcacagcaatacaaccttattcatgacttacgcccttgcgctttaaacggatagcaccaactaacattaacgcccagcccgcgaggaagctcacgccgccaaccggagtgacaaacgcccacaaacgcagatgggacagcgccaggcaataaaggctgccgctgaacaacaccgtgcctaacgcgaggaaaacgctactccagtaaaaccagatactgatgcgacgctgcattgccaccgccagacctaagatcgccagcgtatgaaacgcctggtattcgaggccggtctggatccagcccatctcaacggcccccatggttttacttaacacatgcgcgccaaaagcgcccagagccacaaaaatgaagccgctaatggcggcgaaaatcagcataaaacggctggtcatggtcgtaccctacgtaaattattgttcataacgaaagcggaatttttcttgttcagcagcggctttcgccaggatccattggcgaaaggcggctattttacccagttctgcctgactgtcatgacaaaccagataaaaagcatttttactgaccagaacatcattaaacgggcaaacaagacgtccggcctcgatttcagattgcgccatcacgttatttgccagcgccactccctgcccgtggatagccgcttgcagcaccatggcgctatggctaaaaattggcccttgctgaacgttgatatgatttaaccccaactgtcgggtatatgtctgccagtcacggcggctagcatcatgtaataacgtatgtttagccagatcttccggtgtcttcaagggtttttcgccagtcagcagtagcgggctacacaccggcaataaatattcggcgtacagtttttccacccgtagccccggccagttgccccgaccataaaatatcgccacatcaacatcatccgccagcttatcttcctgacgatcaaccgcctggattcgaacgtcaattcccggataagcactattaaagctggaaagtcgcggaaccaaccaatgaatggcgaaactggggagtaaactgaccgtcaacgcccccttggcgctacgggcctggagtttacgcgtcgcttcggttaattggctaaatatctctttgatatcgaggaaatagctttgcccttcctcggtcagcaggagactacgattacggcggcggaacagttttagccccaaaaaatcctcaagagacttgatttgatgacttactgcggcttgggtcacaaaaagctcttctgctgcgcgagtgaaacttaaatggcgtgctgcggcatcaaaaactcgtaaggcatttagcggtggtaatcgtttagacatggctattaaactttgatgttaaatgaatttaacaattagatcacactatgtaacctattagtttttttaatctgagccattataaattgtccgttgagcttctaccagcaaatacctatagtggcggcacttcctgagccggaacgaaaagttttatcggaatgcgtgttctggtgaacttttggcttacggttgtgatgttgtgttgttgtgtttgcaattggtctgcgattcagaccatggtagcaaagctaccttttttcacttcctgtacatttaccctgtctgtccatagtgattaatgtagcaccgcctaattgcggtgcttttttttaccttgcgatcgcgaattactgatccagttcgaccatctctttcacgtcagtacggttgatctgctgtttgttgccattagcgtctttatagctaatcataccggtatcgttatcagtctgtggtttgccgtcagagacgatggtacgtccgtcattggtgtgcatcacatagttgctaccggaacaggcgctcagggcaaaagtcagcatacaggcagaaataattgcggcagtctttttcatcatcttctccttaaagcgattaataaatcttaatagtattgattaacaggctaaaattaacgcctaacactattcagcatatgttacttacgcggcttcgccaggatatccagataattctgatggttagcactctccttgtatcaaagtgaattttgcgtcacgatcggtgcatcaagccgaggagtaccatgaacgtttttaatcccgcgcagtttcgcgcccagtttcccgcactacaggatgcgggcgtctatctcgacagcgccgcgaccgcgcttaaacctgaagccgtggttgaagccacccaacagttttacagtctgagcgccggaaacgtccatcgcagccagtttgccgaagcccaacgcctgaccgcgcgttatgaagctgcacgagagaaagtggcgcaattactgaatgcaccggatgataaaactatcgtctggacgcgcggcaccactgaatccatcaacatggtggcacaatgctatgcgcgtccgcgtctgcaaccgggcgatgagattattgtcagcgtggcagaacaccacgccaacctcgtcccctggctgatggtcgcccaacaaactggagccaaagtggtgaaattgccgcttaatgcgcagcgactgccggatgtcgatttgttgccagaactgattactccccgtagtcggattctggcgttgggtcagatgagcaacgttactggcggttgcccggatctggcgcgagcgattacctttgctcatagtgccgggatggtggtgatggttgatggtgctcagggggcagtgcatttccccgcggatgttcagcaactggatattgatttctatgcttttagtggtcacaaactgtatggcccgacaggtatcggcgtgctgtatggtaaaagtgaactgctggaggcgatgagcccctggctgggcggcggcaaaatggttcacgaagtgagttttgacggcttcacgactcaatctgcgccgtggaaactggaagctggaacgccaaatgtcgctggtgtcataggattaagcgcggcgctggaatggctggcagattacgatatcaaccaggccgaaagctggagccgtagcttagcaacgctggcggaagatgcgctggcgaaacgtcccggctttcgtagtttccgctgccaggattccagcctgctggcctttgattttgctggcgttcatcatagcgatatggtgacgctgctggcggagtacggtattgccctgcgggccgggcagcattgcgctcagccgctactggcagaattaggcgtaaccggcacactgcgcgcctcttttgcgccatataatacaaagagtgatgtggatgcgctggtgaatgccgttgaccgcgcgctggaattattggtggattaatgacaaacccgcaattcgccggacatccgttcggcacaaccgtaaccgcagaaacgttacgcaataccttcgcaccgttgacgcaatgggaagataaatatcgccagttgatcatgctggggaaacagcttccggcattgccagacgagttaaaagcgcaggctaaagagattgccggatgcgaaaaccgcgtctggctgggatatacagtggctgaaaacggcaaaatgcatttctttggcgacagcgaagggcgcattgtgcgcggcctgctggcggtgttgttgactgccgttgaggggaaaaccgccgccgagttgcaggcacagagtccactggcattgtttgatgagctgggattacgtgcgcagcttagcgccagtcgcagccaggggttaaatgcgttaagcgaggcgattatcgctgcgacgaagcaggtttaagcacagaaccgggtcggataagacgttcgcgtctcatccgacctgattgtttaaccctgacgcgccgctttcgccatcatcttcttcagcgcatgagaaaccgcaacaaacccaaaggtggcggtcaccatcgttgccgcgccaaatccagatgcacaatccatccgcttcggcccttctgccgtggctttcatcgcacacaccgtaccgtcactctgcgggtacaccagcgcttcagtagaaaacacgcaatccacgccgagcttacctttactgtttttcactacgccaaaatcgcttttcaggcgctcgcgcaacttcgccgccagcgggtcctgaatcgttttcgccagatcggtaacctgaatctgcgtcggatcaatctgcccacccgcgccaccggttgtgaccagtgggattttattgcgccgacaataagcaatcagcgccgctttgggccgtacactatcaatggcatcaatcacgtagctataacccacgctcatatactgcgctacgttatccggcgtcacgaaatcatccaccaccgttacacggcactccgggttaatctggcgaatacgctccgccataacttccgcttttgccagcccaacgttatcgcgcagggcatgaatttgccgattggtattggtgacgcacacatcatccatatcgataagcgtgattgcgccaatccccgtgcgcgccagcgcttccgccgcccaggaaccgacaccaccgataccaaccacacaaatatgcgcgtcagcaaacagttgcaacgctttttcaccatacagacgcgctgtgccaccaaaacgctgacgccatgcatcactaattaccacagacatagcacctcagaattaaaaagggcgaggttatccctcaccctaaacgcataaatgcctgatgcgctacgcttatcaggcctacataactcctgcaatattttggatttgcatgatttgtaggccggataaggcgttcacgccgcatccggcatgaacaacgcgcacttagtcaataatcaggatgtgaggttacccctcaccctgtcatatccgtaaaaacggcatacagaatatcacatcagccgctaaagacgttacctgcgcccggggcggttttcagcacccagacacgtccatagtggttgtaccaacctgcgcggtgtccggcttccggcccgatcccttgatagatatcgaagtgttggcctttgattgcaccaccgacatccagcgccaccatcagacgcagttcgtactgaccattaaatttgccgttattatccagcaacggcacttctgccagcaaggtagtacctggcggaataatggaacgatcagaggcaacactcgcgcgaccaaccagcggcaccgcacttgcccctttcaccggagcaaaagattgcggtttaaagaagacgaaagacgggttctgttccagcagctcgcgaacctcggcttcactgtgtgtttcgccccagtgacgaatcgcctgcatgctcatatcttcttttttcacttcgccacggtcgatcagcaccttaccaatgctgcgataggcatgaccgtttttccctgcatagctgaaaaagttaagcggactgccatcaccaaagtcgatatacccactaccctgcacatccataatgaagttatccatcagggagttactgtaagcgagaatatatttatcactcaatgcccccgcgtagatctccgcacgagacggcagacgaccacgttttggcggcatacggtaaataggatactggaactcgccctggcgggtatggcgcgcctgaattaccggcgtgtaataaccggtaaactgcacgttaccatagttgtcggcaccttccatctgccaggcatcaatgccgaactggcgcatattgcgggtatcaccgcctgcgcgcagccactcttgcaccgcgttataaacattactctggttgccatacagacgcggactgctattacggatatggttaatttgctcggcaaaatcaccggcgttaatcggcgcgccaacggcatctggctggttcaccagagagaaaggctgggtaaatttcccgtctttatattgctgtccgcgatcggttggtttggaagagcaggcggcaagcattgccacaaccgtgcccataagaaggtactttacccaacgtcctttcattgttctcttcttcaggttaaaaaataaggcgcaacgaagataacaaaccgccgcgtttaatgaaatgagcagcctctccctgacgcaaattttgcacaaaaaataggctttagtgatttgtttttgttcaaaatcatgccaaatccgtgatcggggtaaaaaaaaggttgcatgaaaacgcgagcggagtatagtgcgcatccacggacgcggggtggagcagcctggtagctcgtcgggctcataacccgaaggtcgtcggttcaaatccggcccccgcaaccaattaaaatttgatgaagtaaagcagtacggtgacgcggggtggagcagcctggtagctcgtcgggctcataacccgaaggtcgtcggttcaaatccggcccccgcaaccaatcaaatttgatgaagtaaaagcagtacggtgacgcggggtggagcagcctggtagctcgtcgggctcataacccgaaggtcgtcggttcaaatccggcccccgcaaccaattattgaacaccctaacgggtgtttttttgtttctggtctcccataaaaaagcgccattcagcgcctttttatcatccccttctcgccagcgtcgccccatcggcaaaatacgctttaatccccgcaagaatagactccgcaacttcctgctggaaagtcgccgttttcagtttacgctcttcctcaacgttactgataaacgccgtttcgaccagaatggagggaatatctggtgcctttagtacggcaaacccggcctgttcaacttgatttttatgcagcttattgattttaccgagcttattcagtaccgctttaccaaacttcaggctgtcggcaatggtcaggctctgtaccatatcgaacatggtgtggtcgacatagcggtcaccgcttttgctcacgccaccaatcaagtcgctggcgttctgggtttgtgccagatattttgccgcagtactggttgcacctttggtactgagcgcaaacacagaggaaccgctcggctgacgactggtaaaggcgtcggcatggatagagacaaacaggtcagcacgctgtttctgggcttttgctacgcgcacttgcaatggaatgaagatgtcttcattgcgcgtcatgtacaccttcatattgccctctttctcgatcagagagcgcaaacggcgagctatttgcaataccacatctttttcgcgcgttttgtatttccccaccgcaccggagtcttcgccaccgtggccagggtcaagcataatgacaatcggacgatcgcgccctgctttacccggttgtggaccactttgcgctggcggcacctgcttttcgaggtcgcctttgttgtaatcctccagcagcgccagcagcgggtcctgcatatcctgtgcattggccggatagaggtccatcaccagacgctctttaaacccggcgaccggcgcaagggcaaacagctgcggttttacgttttgctttaattcaaaaaccatccgtacggtttgcgggtcaaattgcccgacgcgcgcgctcttgatgaacgggtcgtctgcacgaatttgtgccgccatccccttgagtacgctgttcaggtttacatcttcgatatccaccaccacgcgttcagggttactcaacgcgaactgcttatatttcagctgacgattactttccaccgtcacgcgggtgtagctggacgcaggccagacgcgcaccgccacgacctggctgaccgcagccagactgacctgacttacgctcaatagccacatggcacccgcgccttgcagtaaacgacgacggctgattgcagtgttggatccactcatgcctctcccgagcaaaagaaatctaagctgtgtaacaagtaaacgactaatttgaccggaaactttagcgaaagacgcataatctgtcatctaataaacggtaaacattctttttatattcacggcattactgataaaaaagtcgctctcgcataaaatttacacttgcaccctgcgaaaaaacagaataaaaatacactaatttcgaataatcatgcaaagaggtgtgccgtggtaaaggaacgtaaaaccgagttggtcgagggattccgccatagcgttccctatatcaatacccaccggggaaaaacgtttgtcatcatgctcggcggtgaagccattgagcatgagaatttctccagtatcgttaatgatatcgggttgttgcacagcctcggcatccgtctggtggtggtctatggcgcacgtccgcagatcgacgcaaatctggctgcgcatcaccacgaaccgctgtatcacaagaatatacgtgtgaccgacgccaaaacactggaactggtgaagcaggctgcgggaacattgcaactggatattactgctcgcctgagcatgagtctcaataacacgccgctgcagggcgcgcatatcaacgtcgtcagtggcaattttattattgcccagccgctgggcgtcgatgacggcgtggattactgccatagcgggcgtatccggcggattgatgaagacgcgatccatcgtcaactggacagcggtgcaatagtgctaatggggccggtcgctgttagtgtcactggcgagagctttaacctgaccagcgaagagattgccactcaactggccatcaaactgaaagctgaaaagatgattggtttttgctcttcccagggcgtcactaatgacgacggtgatattgtctccgaacttttccctaacgaagcgcaagcgcgggtagaagcccaggaagagaaaggcgattacaactccggtacggtgcgctttttgcgtggcgcagtgaaagcctgccgcagcggcgtgcgtcgctgtcatttaatcagttatcaggaagatggcgcgctgttgcaagagttgttcagtcgcgacggtatcggtacgcagattgtgatggaaagcgccgagcagattcgtcgcgcaacaatcaacgatattggcggtattctggagttgattcgcccactggagcagcaaggtattctggtacgccgttctcgcgagcagctggagatggaaatcgacaaattcaccattattcagcgcgataacacgactattgcctgcgccgcgctctatccgttcccggaagagaagattggggaaatggcctgtgtggcagttcacccggattaccgcagtagtagtaggggtgaagttctgctggaacgcattgccgctcaggcgaagcagagcggcttaagcaaattgtttgtgctgaccacgcgcagtattcactggttccaggaacgtggatttaccccagtggatattgatttactgcccgagagcaaaaagcagttgtacaactaccagcgtaaatccaaagtgttgatggcggatttagggtaagcgatgaaaatcgtcggatgcgacatgcgtaacactcgtacgtcgcatccggcaattacgtttattcccgactactaaacaacgccgccagaccactgcgccgctcagtacgagtggcgattgccgcacttaatatgcgctcatcggcatacaggctcagacggcgacgcgcgcgggtcaccgcggtataaaccagctctcgcgttactaccggcgtgcgttggctcggcaaaatcaacgccgcatggtcgaactcgcttccctggcttttatgtaccgtcatcgcccacgtagtttcgtgctctggcaagcgactcggttgcacagacttaatattgccgtccggcatcgcaaaccagacgcgcgtcccctgcccgcgatccagcgcaataccgatatcgccattaaacaacccaagcgcgctgtcattacgggcaatcatcaccggtcgaccttcgtaccaacgagagtgcggatgacgatgaattttgcgcttctgttgcataaactgctcaattcgctcattcagtccagccacgccaaacggcccttcccgcagggcgcacaaaagctggtactcattgaacgcctgaatgattaaatccggctcggcacgcgcttgcagcagatccagataacgtccgtaacccgcaagagcttcctcaagcatcgcaatataatcttcgccgctctgtaaaagccgtttttcgatatcagtaaaatcctgctgaaaaacggttttcactgccgttttatcaccacggttgatcgccgcagctaactgaccaatgccagaatcgctgccgaaacgatagcttttttgcagcaggcagagactgtcgcgcaaagatgccgcttctgtgccggttcctgccggaacgtgagtccccgtcaggcggcttagctgcctggcacgctcggcggtaaagcccgcgttggcataagcgcagatatcgcccagcacagccccagcctcaacgctggccagttgatcacgatcgccgagaaagatcactcgcgcatgatcgggcaaggcgtcgatcagtctgctcatcataggcagatcgatcatactcgcttcatctaccaccagcacatcaagatgcagcgggttaccggcatgatgacgtaaacgctggctacccggctgcgcgcccagcaatcggtgcaaagtgctggtatcttccggaatgcgtttcttttgttcatcggtcagcggtaactgtcgcaaagccttgccgagagattcggttaagcgcgcggcagctttacccgttggtgcagccagacggatacggcagcgttcgccgtcggccatttgaattaacgctgccagcaacttcgctacggtggtcgttttaccggtgccagggccgccggaaatcacgctgatccgccgcgtcagcgccactgccgccgcaactttttgccagttaatttcatcgcttactggaaaaagtttgtccagggtttgcgccagtagagcttcatcaacctcaatggcatgattcacttcgttgaaaaagcgtgccactgtgcgctcgttacaccacatgcgattcaaataaagacgatcgccacagaggatcatcggcgtgggttcatctcccctgctgaccgcttgagaagccagcaagcattcttcccaattttgtagctcaccgatttcactgacacaggtcgccaacagcggatggctcgcctcgttattttccagtcgactaagcggcaaacaaacgtgtccctctccggcatcatgacttaacagtgccgccgcgagggtgacggcaggatgttcatctcccgccacggtcagggcaaattgcacatccagcgggcgtagctgtttgtgctccacagcttccagtaattgcttttgcaatttcattacgcctcctccagggtcataccggcaaacatctcatccatcagggcaatcaacccggcgttgggtcgggttgtgtaaatcccctgttgcggatgttctttatcaacgccacgcaggaacagataaataacgccgccaaagtggtgctcatagtcgtaatcagcaatgcgatggcgcagataacgatgcagcgccagggtataaagctgatattgcagatcatagcggtgtgcctgcattgccgctgccatagcctgttgggtgtaagcgctactgtcttcacccaaccagttggatttatagtcgagcaggtaataacgcccttcgtggcggaacaccaggtcgataaagccttttaacatgccacgtacctgcatgaactccagcggcgggcagcctgcggatagcgggtcaaactggcggattaacgtatcaagctgactggcgataagcggttcactaatcggcagataaaactccatctccacctgtttattgcgggcggaaagttgactcaggcttacgccggtttcattgagaggtgcctggaggacagccgtgatccactcggtcaataccggttcccactggctttcaaagccgccgagttccagtttttcccgcacccagttcgggtcaaccggctgggtaaaatccaggtcttcaaacaaactgtgcaagaacgtccccggactcgcaccgcgcggaaactgatgtggtgttaacgtcggttcttcaacgacgctggcaacgcctgcagcatcgacatccagccgaggcatcaaatcctgggcgataccgtgaccacgctgttgcaaaccagagtagctggtgacgcgccagttatcgccgggcaatcgttgtaacgtcttcgcattcagctctgctgtagaaacatcattaacctgccagggttggttatcaccagtttgtgccgtttgccaggcaatatcatcatcgcataacgcttcaatacaggtgcgaagccctgccgcatcttgcggttcccctttttgcagcaaacgcccgagcgcactttggtggacgtcggtgtcaccttttttatcgccacgacggcgcaccagcggtgcaacgccgagactgcaatgccaaacgctacgtgtcagcgccacgtaaagcaaacgcagatcttccgccagacgttcggcctccgcgaggtcgacgctttctggcgcagcattaagatccagaactgcctcaaagctgtggcgatcgtgataaaacgcctgctcctggacgcggaaattggtgataaacggcagccagaccaatggatattccagccctttgcttttgtggatcgtgacaatctgcaccagatgtttatcactttcgagacgcatttgttggctggaggcattactgtctggctcgaggatatgttggcttaaccagcgtaccagcgcatgttcactttccagctgcgttccggcttcttgtagcagttcgctgatatgcaagatatcggtaagacgccgctcaccgcctgccgttgccagcaagttttcagcaatgttacgcgcgctcatcagcgcccgcagcatcggcataacgccacgtttgcgccagatttgccgataaccatcgaactcttcgactaccacatcccacgcatgttcgtcattgttcagcgtttcgatatccagcgcgttcagccccatcatactcgttgccagcgcactacgcagggtgttctcacgttcgggcgtcatcaccgcctgcaacaaccaaagcatttcctgcgcttccagagtttcaaaaacactgtcgcggttgctaaggtaaacggaagggatttccagcaacgttaaggcatcgcgcacctgggcggcctcctggcggctgcgcaccagcacactgatgtcgctagcacgcaccggacgcgcgtcgtcgccgttcatcagcaacgcttcgccccgctgtccggcttgtagccagtcgcggatttgcgcagcacatacctgcgccatggtactttgataatcgccaacgccgcagctttcgccttccatcagccacattttcatcgcaggctgtgtttcacctttaaatacaaaacgtaacgcctgatttttcccggcacttttcactggaataaacggtatttcgcgaaacatgaacgcgtcatcagtctggctgaaaagcttattcacgctgttcaccattcctggtgcggaacgccagttggtgtctaaagtgtagtgggcgtgaacttcgctacgcgccttcatataagtgaagatatccgcaccccggaatgcatatatggcctgcttcgggtcgccaattagcaacaatgcggtttccggctgatggtgccagatacggcgaaaaattcggtactgctgggggtcggtatcctgaaattcatcgatcattgccaccgggaatcgcgtacggatcgccgctgccaacacctcaccgctttcgctacgcagcgcggaatcgagccgacttaacatgtcatcaaaacccaattcgccacggcggcgtttttcacgcgctactgtttcgcggatctcagccaatgcgcgggtgatcaccagatcgcggatgctcaatggttctgcaagcagttgatcgatcgcctcaaacagtggatgtcgcggggtttcccccccggccttcgtgcgatcttctaagaaacgctgggagaatttttccaggctctccggcaactgataactgtttgtctcttcttctgcccaggcgctgatcttgtcgatccatttagcctgattgctacggttaaacttgcgtcgatcaataccagaagattcgatcagcgcatccagttcacccactgcgtcgcgccactgctgttttaccgtatcaatacgcgccacaatttgcgcgtgacgggaagccagcgtttcatcatcgggcggcggtgctttgataaccggcgcttcgccttgcagataacgattaatatcgcgcagcaacgcctgcggccctttccaggtttcaaagacgacctgggctatttcacgcggcagcgggtagcagtggcgacgccagaaatcggcgcaggcctggtagcgtagcagagactcatcttcaatcagctgctgctcaaacagcatgccggattcaaaggcattcaggttgagcatgcgctggcaaaagccgtgaatagtaaagactgccgcttcatccatctgccgttcggctaacaacaaccactgcgcggcttgcgctttatcgtcgatctcttccagcaggcgttcgtacagtggattgtcggtggtttcacgcagacaggcgatgcgcaactcgtggatattgctacggatacgaccgcgcaattctgccgtggcagcctcggtaaaggtgaccaccagcagttcttcaacggtcagcgggcggggaaaggcggcggaaccgcctagtccaagtaacaggcgcaaatagagcgccgcaatcgtaaaggttttgcctgtgccggcagaggcttcaatcaggcgctcaccctgtaagggcaagcgcaaaggatctagtgtctcggcgacatcactcattcttttcactcatcaggggcattgtttgctgcaacgcgctgacgttctcccacactttccagccttcagggtgtacatattcggctttcccgttctggctgccggaaatctggctcagaatagccatgccttgcggctcgaccaccgcctgatggaagaaatcagcaagtttttgcggcgtcagcagttttatctgggccacgattttatcacggctatcgaagcgcatattgccgcgatcgaaatctttacttaacttgcttgcttcttcgccgagcgtttgcggtgcctgcagcatctgggtaattaccgcctgctggatttgcgcaaactcatctggcttcatcgctcgcaattttgcctctgcggttgggaaaaacgccttgtaacgctcccacaagaaactaggctgtttatcattgctttgcaaaaggaagcccatgccccactgacgccccacgctcattggaaacgcaaacacggcatagcccaattgttcttcggtacgcaactgattgtagaaccacggctgtacgatctgccccaacagagagctataggcactgctggtgtattcatcgtagccagtcggtacaaataccgctgccagtgcggagtcggtgctgttaccggctttttcaaagatgacggattgttttttatcgaccactacatctttgtttcgacaccactcactaccatcagcgcccaactgtttttgcacatcgcgtgccagcgttgttgcctgggcctcggtcatgttgccgataaccataaactctggtcgagccccactttttaaggcgtcgcgataggccagcacctctttcaacgtaatggagggcaaaattttacgccgttcatctcggctgaagtacggcacttggctgagcatctgcgcgggcataatcgcctgctcaaacgctttacccttttctgcggaatccatcatctggttataccaggacttcgcctgctcaagctgatcttccgtagcggtatagctaaagtacccctcgagcaatgcctggaacagctgcggcagacgctgggtgtaaccattagcattaaccataaggccgttgttagcgttggtggaaaaacttatgccaccaacgctcgcctggttgcttaactgatcaagcgccagccctgcgagataatcattgagcgcaaacatcacctgattgcgggcgctgtccatggctttcggattacgcaaaatcaggctgacatcagctttgggctcgctggcaaaataacggcttggcgcatacaccacgcgcagattgctctcatcaacaatcagctctggatggtcgtatttcttctcactcttaatcaggctgaaatcatcaggaatataagggttaagctctggcaaagagagcgcaatgtcggcggcttttttctgccagtcggcgaaagtttgtgcgctgattttatcgacctgatacggcgcatcgacaaagtaagccgttttgttgtgcggctctttcgggctgatataccagatacgcgcattctgcggcgtcatcatcgccagacgttcctttactgctttagcatcgtaccgatcggcaatattgactgcatccagcgtatgctcaacaggaacgcgaatcatggtatctgccagccattcgacgtaatccatatcacgggtgatgctcggataacggaagtcgatatccagcacattcgccagttcatcgaagtattgtttatcaatgcctttttcacgtaacagattgagatagctaaaaattgccgccacaacctgatcgcgattagccaggcctttatcggttaaagacgcagagatcgctaatacgccgctgttgccgttgacgataggatcggagttggcgctaatgccctcaactaatccctgcttttgcagccagtcagaaagtgtacctgggctgcgattgccaatcagataggtaatcaattcatcggttttactacggaacttcgcactgttgttatcgatgcgaaactcaacgcgcaacactttacgcggcagcgcagggacgtaatgaatgataatgcccttttgcgcgtcggtgactaccggcacggtgatttccggttttttgctctctttgttcggcacgcgaccaaaggtgtccgccgccatttttgccaactccggcagcggtttattactgtaaataaccgccttcatcaaattggcggaatagtacttctcgtggaaatctttcagcgcctgctgcaccggattaccaggtttgtcgcttaaagtttcgaggttaccaccagaaaacttactaccggggtgtgccgggttaatggtttctgcgctgacctgtgccatgcgcatcccgtcacgcgtacgcgccatggttaattcagcgttcaccgcattacgctcacgttcggcatatttcttgtcgagcaaaggttcagcaatagcatcggccaggcggtctaccgcaccaggcaaggcgtcgttctcaacttccagatagaaagccgtgcgatacggcgcagtgctggcattgtgactaccgccgtgcattttgagatattcggccagactgtcagcctgcgggtactttttgctccccatcagactcatatgttcaaggtaatgtgccagcccctggtacgcctcgggatcttccaggctcccaacgggcaccaccagcgcgctgaggcttttaactgcctgcggatcagaaaccagcaagaccaccataccgttatccagacgtatagcctgatactggcggttatctttatcacttttacggatggtttcctgaatcggctgccatcccgtttctgcctgacttaagggtgcccaaagggcaactaacaacaataatgctttgaaccaggtgctgcggggcattcacggacctcataatcaacttaattttctgtccagattcaacacgttaacgcaaatcatctgccagaatttaatcttgtgctgcacgagtcagcctatgtttatataaccatcagtccgtgactggtgcgcatcataaagtaagcggatagattgcgcaatttttatacagcactcaactctgattaaagcgaaacagcggtaacaggaaacgttggctctgttcaacgatggcctccattgtctctggtgttaattgccgccagagcctttgataccagatatcatcaccttcgccacgcaccatcatgttgccttcgtaagcctgaaggaatttcgtacgggctttttgcaacgtggaatcgtcatccagcatggcatcgttttgcgcgtcataacaggtttttagccacgcgccgccactttcaggtaacaccagcaatggcgcggacattccttcacgatacccctcaatcagttgactgaggtaatgcaaagcctgttcggctgcaagcggcggaaaacgccactcgccgtctttgcgtagaaaaaggcgactttcaccattaccaccgctggcacagtagacaaggtgttccagccaaagttgcattccctgggccacacttaataaagagggacgccagcgcaacaggccatccggctgcacctgcggcaaccagccagttatctgcacaccgttgcaggcgagatcaatttccatactctgccccggctggcgacaggcaatgactctgtcggcaagctgctgcatctcctggcactgtgtttcccagaaaatttcaccaaaagcgccatacggtaaatcccctgccgctcggaagcggcggaacaagcgttcggcatcatcctgctcaaccagtgcattcaataactgctgattgatttgataacggctaagtccttccagaataaatggctcggtgtcggggatttcgctgtcttcagtacggaagttcacctgcaaacgcatctggaaaaatgcccgcaccggatgtgcccagaatcgttgtagcgtttccagcggcacggtttccggtaaggtaaacggcagcggctgaacaaattcagaatgtgctttaccagcctggctggccgcaggtagccattcacgagcatagctttgtcgttcgcctggctggtagttttgtggatcaaacggcatccgggtatggaggcaagtaagatgcgcttttacccttgcctcgctttcatcacagttgagcgcttcatcgcccggtagataatgactttgcccgatgtagtcgatcagttcctgcaccagtacgctcgggaaacgctcactgttatcctgaatggaacgaccgatatagctgatatagagtttttgctgcgcggaaattaacgcttccaggaacagatagcggtcgtcatcgcgacggctacggtcgccacgcttcggtttctggctcatcaggtcaaagcccaatggcgcaagctgacgtggataaacgccgtcgttcattcccagcaggcaaaccactttgaacggaatactacgcattggcatcagagtacaaatgttaaccggtccggcgagaaaacgctggctgatacgttcttgatccagacgctgtgccagttcatcacgcaatagactcagcggcaccgcgtcgccatactgcgcacctaaaccttcggcgataatcgcctgccattgttgttcgatcagcgtcatcgccgcttcggtttccgcatccggcaggaagaaggcgttgagcatatcgcgacaaaccggcaaccactcttccagcggacgctcctgtgccagcccgcgacgccagatgtttagctgcattagcagactagccagatgccccaccagttctgcaattaagccgctgctttcatcataaggtagaacgctttgccactcgccctgcgcgctctccatcgcgtagcccaacaacatacgcgtcaggccaaatcgccaggtgtgttgtccggtggcggggagttccagctcgcgaacgttgtcgtcatctatgccccaacgaatgccggattcgttgacccactggcgtaaataacgcagcccttcttcggtgatgtcaaaccgcgccgccagcaccggcacatccagcaacgccagcacatcctcactcacaaaacgactgtcaggcagacttaacaggctgataaacgcttccagtaccggatgactctgccgcgcacgacggtcggaaatggcgtaaggtaggtaacgatccgcaggtgcgctaccaaacacagcctgaataaacggactgtagctgtcgatatcagccaccatcacgatgatgtcgcgcggagtaagtgtcgggtcttcctccagcatcgccagcaggcgatcgtgtaaaacttcaacttcacgctgcgggctatggcaaacgtggaaggtgatactgctatccagtggatcaagcgggcgtttgttatcgctacgggaaaactcttcgatgttcacaccagcaacggcgcggttttccagttccagaatgtcagactgaatgttatgcagcaggttatctggcgtgacatcgacaaaggcgtccagctcctggctgctctccaggtcagaaaggagataaatgtagtcgcgcccaagcttaccccaactagccagcagcgggttgccgacatcctgttcaccatcgctgttaaagagctgcccggcattttcgctatcacgaaatagcggcaattcgcgatcttcaaaactgtgtcgacgctgacgggtcagcagtttcgccagataagcaggatctttaatatcgccccagtaataacggcaggggttggtaaacaggagatggatttcaatatgtttacccagcgcctgtagcgcctggagataaacaggcggtaacgcggaaataccgcatataaagacgcggctaggtaaccccggcgggcaggtcgtcgcggactccagcgtttcgataaagcgctgatagagattggcgcggtgccagcgcggttgcccgagttgatgggtatattccaccagcgccttccacaacggggcttgccaggcctgtgcttctcccagcccttcaaccaaatgtcctgtttcccactgtgccagccagtccggacgatagaccagatactggtcaaacaggtccgccgctttactggaaagctggaacagttttcgcttgtcgctatcgtcagtcagataatgccgcaacagggtaaagtcttcgcgctccagcaattgcggcagcagagtcatcagtttccagctcatgctctgtttgttaaaggcgctctctttggggatttccggtaacacccggacgaacatatcccagataaagctcgctggcagcggaaaatcaatgtttgccgcaataccaaacttttggctcagggtcatttgcagccactgtgccataccggtactttgcaccagaatcatctctggttcgaaaggatcgtccagccgttcgcgttcgacaataaactccatcaacgcttccagcacgtccagacgattggaatggtagacccttaacatagcggctcctgattactgacgattcgggcaatgcaggcgggtcatctcgccttctctgcccccgggactaactagcgtaacgctgatgctgacacatcccgcctggcttgtctgcattcggttgacctgccagttggcaggtgggctaatcgcgcgcagttgcgtttgctgccagccatgccgccagagctgttggtactggtttctgctggcaagactgttcattaatgttcgctggaaaccgcttaacgcagtgacaatcatcaccatcaacaccatcgccaacattacctccggcaggctaaagccttgttgattcttcagggaagcactcataacgccctctctttcagcggttaaatcagggaagctgacataacgccctctctttcagcggacaaaaatcgctccagccgcgtgggctaaaaacaatgtttccatcaatgacttcgcctgttcgccacaagctaacgccttcataaccggcaatcaataaggcttcattatctgccagtaaacgcaaacaaacctgggcatcggtttcagcgtactggctgcactgaactgctggctgcgtctgccagcagtgcatttttccccacgccagcgcgctctgaacgatggcctggcggcgcaaactctgactttccatgctcacgcgagaggcaaaactgcgatcctgttggctcattccttgtaatagcaaactacccaaaaccagcagcatcaggaccagagccagactgctaacacccttttcgcggttcacaggttgaatcctgtcacgctatagctggcattcaccacggtttgcggttcagacttactggcagcacgcatattaaccgtcaacaccgggctgaagccgctgacatcctgacgtacgacctgaaaagtgtcgataatgatggcatccggattagtgactttatcccagcccttaccttcacaggatgtcgcaccgcgtagcgtttccagcacatgctccttcagacgaaatccaatctggtcggactcttttaccggttcgcgatcccagataccgttactgttcgcatcccactgcacaatgacacagtcaccctgtccgacaatttccagcccttcgccggtacagatgccatgacaataacccgccctctggagatgcttcgcgacggtaaatacccgcagccagatttcatcttccagcgccagcttacgggtgctcgttaaactttcacgctgtaacgcaggcagaaagcgtgccgcccccagcaacaatacgccactgatcgccatagcaatcaacacttccagcagagaaaaaccttgctcttttacaggcatccttctgtttctccttgctgacaaagccggagtcttccccacgggctaaccaccagccaccactcgcccgtactgtttttgaagcgaatatgcccggcccatgcggtattgcgcaggccaaagaaagcaaggctaggtgtcaggtcgctcatttcgacttcgggccagcgtggcacaaagaccaatggactactgccatgacaggtattggccccagcagcggaactcacaaggcaccataacgtcccctccctgataacgctgatactgtggtcgcggttatgccagttggcatcttcacgtaaatagagcaaatagtcccgcgcctggctggcggtttgccatagccgttggctctgctgccagtattgccagccatagagtccacttgcgcttagcatgaccaaaatcagcatcgcgaccagcgtttcaatcagcgtataaccacgttgtgttttcatgccggcagtatggagcgaggagaaaaaaagacgagggccagtttctatttcttcggcgcatcttccggactatttacgccgttgcaggacgttgcaaaatttcgggaaggcgtctcgaagaatttaacggagggtaaaaaaaccgacgcacactggcgtcggctctggcaggatgtttcgtaattagatagccaccggcgctttaatgcccggatgcggatcgtagccttcaatctcaaagtcttcgaaacggtagtcgaagatggattcgggtttacgtttgataatcaacttcggcagcggacgcggttcgcggcttaattgcagatgagtttgatccatatggttgctgtacagatgcgtgtcgccaccggtccagacaaaatcacccacttccagatcgcactgctgcgccatcatatgcaccaataacgcgtagctggcaatgttgaacggcaggccgaggaagacgtcacaggagcgctgataaagctggcaagagagtttgccgtctgccacatagaactggaagaatgcatggcacggtgccagcgccattttatccagttcgcctacgttccacgcactaacaataatgcggcggctatccgggtcgtttttcagctggttcagtaccgtagtgatctggtcaatatgacgaccatctggcgttggccaggcgcgccactgtttaccatacactggcccgaggtcgccgttttcatcggcccattcgtcccagatggtgacattgttttcgtgtagataagcaatgttagtgtcgccctgcagaaaccacagcagttcatggatgatggaacgcaggtggcaacgtttagttgtcaccagcgggaatccatcttgcaggttaaaacgcatctgatgaccaaaaatggaaagcgttccggttccggtacggtcgtttttctgtgtgccttcgtcgagcactttttgcatcagttctaaatactgtttcatggttcctcaggaaacgtgttgctgtgggctgcgacgatatgcccagaccatcatgatcacacccgcgacaatcatcgggatggaaagaatttgccccatgctgatgtactgcacccaggcaccggtaaactgcgcgtcgggctggcggaaaaactcaacaatgatgcgaaacgcgccgtaaccaatcaggaacaaaccactgacagctcccattgggcgtggtttacgaatatacaggttgaggataataaacagcaccacaccttccagcagcagctcgtaaagctgacttgggtggcgcggcagcacaccgtaagtgtcgaaaatggattgccactgcgggttggtttgcagcagcaaaatatcttctgtacgggagccagggaacagcatggcaaacgggaagttcgggtcaacgcggccccacaattcaccgttaataaagttgcccagacgcccggcaccaagaccaaacggaatgagtggtgcgataaaatcagagacctggaagaaggaacgtttagtacggcgggcgaagataatcatcaccacgataacgccaatcaggccgccgtggaaagacatgccgccgtcccagacacggaacagatacagcggatcggccataaactgcgggaaattgtagaacagaacataaccaatacgtcccccgaggaagacgccgaggaagcccgcatagagtaagttttcaacttcatttttggtccagccgctgcccggacgattcgcccgtcgtgttgccagccacattgcaaaaatgaaacccaccagatacatcaggccgtaccagtgaagcgccacgggtcctatactgaaaatgaccggatcaaactccggaaaatgcagatagctactggtcatctgtcaccacaagttcttgttatttcgctgaaagagaacagcgattgaaatgcgcgccgcaggtttcaggcgctccaaaggtgcgaataatagcacaaggggacctggctggttgccggataccgttaaaagatatgtatatgatccgcgttataaccctccgcgaatcagcccgcccatgccgcgacgctccataaaggctgcaacctgatggcgaacttcggtcgccagttgcgcttccagactacgctgcgcaagattttctgcttcggcataatcaatgcgccgcagcaggtattttgcccgcgctacagaacgtccgttcatagacagatggcgatacccaagcccaatgaggattgccacgcacatgggatcgcccgccatttcaccgcacaaacggagatcgattccatgtatttccgcttcccgggcgatcatcgccagagctcgtaacattgcaggatgaagactgtcataaatgttcgccacccgggtattgttgcgatcaacggccagaatgtattgagtcagatcgttggtgccaacagagatgaaatcgacccgctttgccagatgcggcagcataaataccatactcggcacttccagcatgatgccgatacgtggtttgggaatttcgtaaccgatcatctcctcgacttcacgtccggcacgttcaatcaggcggcgtgcttcatcaacttcatcgaggcttgtgaccatcggcaacagaatattcaggttgcccgtagcggcattagcacgcagcatcgcccgcacctggatcaagaagatctccggctgatcgagcgtaatgcgaatcccacgccaacccaggcatggattctcttcgctgatcggcatgtaaggcagctgcttatctgctccgacatccagcgtacgcaaggtgacgggtttatcattgaacatttgcagcatcccctgatactgcgccacctgttcttcttcgctcgggaaaccactttgcagcatgaatgggatttcagtgcgataaagaccgatgccatcaatacggctgcccagtttttcttcatgttccgggcttaaaccagcattgagcatgacttttatacgctcaccgctttttaactgcgcgggtaaattgacgtcatcttccgccagacggctaagctcaatctcttcactaattagccgctgatattcttgcagcagtaccggctccggatcgaccagcaattcaccgcgatagccatcaacgatcagcgtcctacgatgcagcacgctaggctgaatatccgcgcccatcacggtagggatccccagcgcacgtaccatgatcgcagcatgggagttggctgcgccatctcgcacgacaacaccgactaagcgatcctggggcagctcagcaagcgttgtcgcactcagttcatctgccaccagaatgaaacgttccggccaggcgttcggcccttgattagcgtcatcaagatgaaacagcaatcgctgacccagcgcacgtaaatcgccagcccgctctttgagatagttatcacttagcgcggcaaactgttcggcaaatttttcaatgaccgtttttaccgcccactctgccacgctgcctttatcaacctcggcaaacaattcgcgacgcagccgggtgtcgctaagcaggtggctgtaaagatcgaaaatagccgccgtttctttttgtgcaccggcggcaaagcgtttgctgtagcggcgaaactcgtttgccgcttcttccagcgccccggtcagtcgttcgcgttccagagccggatccagcgtacttgcctgatacacctgttccattaaaggtaacgtggcatcctgccagccttcggcaatcgccacaccaggtgctgccggtaatgcgcggattcgcgtctggcgatattgcccaaacaaggcagtcaactggctctgagaaagaatagctgccatctgggtggcaagcgtcaccaggaaggattcttcactttcgtcatactggcgcaactctcgttgctgtaccaccagtacaccaagcaactggcgacgttgaataattggtacgcctaaaaacgcgcggaaacgttcttcttttacggaggggatgtatttgaagctggggtgcttttgcgcatctgcaaggtttatcggttccgccagcctgccaaccaggccgacgatcccttcatcaaacgcgagcgttacagtgcgaccgcgtggttttttcagcccccgggtcgccatcaggtagtaacaacgtcgatcatgatcggccaggtagacgctacagacctcggtatccatcgcaagacagatgtcggtaaccagaatatttaacgcctcattcaggcgtggtgcgctggctaccttttcgactatttcgcgcaggcgagtgagcataattggcgtgacttaacctcttttacgtcgataagcagatgcgttttgtggttttggcgtattttcctgcagactcatcaccacactcgcgaactctttcattaccctacggtagacatcacgtttaaaactcaccacctgtctgaccggataccagtaacttacccatcgccagccgtcaaactctggtgtactgctggtttgcatattgatttctgcatcgccgctcaccagctgcaagagaaaccatttttgtttttggccgatacaaaccggcttcgtgtcccaacgcaccaaacgtttcggtaatttgtagcgcaaccagttacgcgtactagcaaggattcgaacgtctttgcggcttaatcctacttcttcaaacaattcacggtacatcgcctgctctgcggattctccggggttgattccgccttgcggaaattgccaggagtgctgaccaaatcgccgggcccacattacctgcccctggcgattacaaatcacgatacctacgtttgggcggtagccatcgtcatcaatcaccggactacctcaaaataaagctttatatacgaatgattgtttcatactccaggaagacggtaaaccactctctgcagggcattacacactaataacaattgaataactcacagttatgtgcagagttataaacagaggaaggggtggatagccgtttttattcaccttttctgtggatagagttgtgaagaactacggaattactacgggaaaacccggagcattctgaataagcccgatatagacattttaaaatattcattatcagtcaatgcattacatgtaattttagtaatgaaaaagagtaattcgtgacccaggtcacacctctcatttacgggttggcgaaagatcaaccaatgccgtatttatccacagaatgtgccactaagttaagcactgaaccactaaaaactggagtttcgtcgcacgtcaaggctgtaaatggaaacagtagtggaggtttttcacagttatcccagctttctgtggataacatggtgtaagatcctgtttattttcagtgaccagatttggaaaacccgttgcagtgttgcgcaactcgattaccggcaacctaaaaagcaatataaatcagagaattgaacaacgcatgtggaaaaagttacactgcgaatattcggcacataattgctgtttgttttttaatcaaggtatcatgacatgtcccaacctcgcccactgctctctcctcccgaaactgaagaacagttgttagcgcaagcacagcaactttctggttatacattgggagaactggcggcacttgtcgggctggttacgccagagaatttaaaacgcgataaaggctggattggcgtgttactggagatctggctaggtgccagcgcagggagtaaacctgagcaagattttgctgctctgggcgtggaacttaaaactatccctgtggatagtcttggtcgtccgctggaaacaacattcgtttgtgttgccccgttaacgggcaatagcggggtgacctgggaaaccagccacgtgcgccacaaactcaaacgcgtactgtggataccggttgaaggcgagcgcagcatcccgctggcgcagcgtcgcgttggaagtccgttgctgtggagcccgaatgaagaggaagaccggcagctacgcgaagactgggaagaattaatggatatgattgttctcggtcaggttgagcggattaccgctcgtcacggggagtatttacagatacgaccgaaagcagcgaatgcgaaagcgcttaccgaagccattggtgcccggggcgaacggattctgacgctgccacgcggcttttatttgaagaagaatttcaccagtgcactactggcccgtcattttctgatccagtaaccatcgctttgacctgccgctttccgggcatataattaccgcttcatttttttggcagggctttttagatgttatttgcatggataaccgatcctaacgcctggcttgcgctcggtacgctgacgctgctggagatcgttcttgggatcgacaatattattttcctttctctggtggtggcaaagcttcccacagcacaacgtgctcatgcgcgccgtctggggttggcgggagccatggttatgcgtctggcgctgctggcaagtatcgcctgggttacgcgcctgacaaatccgctttttacaatattcagtcaggaaatttctgcccgtgatttgattctgcttctgggtggcttgttccttatctggaaagccagcaaggaaatccacgaatccattgaaggtgaagaagaagggctgaaaacacgcgttagtagtttcctcggcgctatcgtgcagattatgctgctggatattatctttagcctcgacagcgtgattacggctgtgggtctgagtgatcacctgtttattatgatggcagccgtggtgattgccgtaggcgtgatgatgttcgccgcgcgcagcattggtgattttgtcgaacgccatcctagcgtaaaaatgctggcgctctctttcctgattctggtgggctttaccctgattctggaaagtttcgacatccacgtaccgaaaggttacatctacttcgcgatgttcttctctattgcggttgaaagcctcaacttgattcgcaacaaaaagaatccgctctgatactccgtacgctctcctgcgggagggcgtactcactccttttaccctcacagtttaagattttcctgctttcaagatatataacgtcggtttataaacagactattatcataggtaggccaaatgaggataaccggatgaaaaaatgggcagtaataatttctgcagtcggactggcgtttgctgtttccgggtgttccagtgattacgtcatggcgaccaaagatggccgtatgattttgaccgatggaaaacctgaaattgatgatgataccgggctggtgagttatcacgatcagcaaggtaacgcgatgcaaattaaccgtgatgatgttagccaaattattgaacgttaacaaataaggtcagcatccggctggccttaagatttttctctttcccttttcccttccctctgccatttttatattccttatgtcgtgattataaaaaggaaacggctatgcaatatcaccgtataccccacagtagcctggaagtcagcacgctggggcttggcacgatgacgtttggtgaacagaacagcgaagccgacgcccacgcacaactcgactatgccgtcgctcagggcattaaccttatcgacgttgccgaaatgtacccagtacctccgcgccccgaaacgcaagggttaaccgaaacctacgtcggcaactggctggcgaaacatggcagccgcgaaaagttaattatcgcctccaaagtgagcggaccgagccgcaataatgacaagggcatccgcccggatcaggcgctggatcggaagaatatccgcgaagcgctgcatgacagcctcaagcgcctacagactgattacctcgatctttatcaggtgcactggccgcagcgcccgaccaactgcttcggcaaactcggttatagctggacggattctgcgcctgcggttagcctgctggatacgctggacgcactggcagagtaccaacgcgcgggaaaaattcgttatatcggcgtgagcaacgaaactgcatttggcgtaatgcgctacctgcatctggcggacaaacacgatctgccgcgtattgtcaccattcagaacccttacagtctgttaaaccgcagttttgaagtaggtctggcagaagtcagccagtatgaaggggtcgaactgctggcctatagctgcctgggtttcggcacgctgaccgggaaatatctcaatggtgcaaaacccgctggcgcacgtaatacgctctttagtcggttcacccgctatagcggtgagcaaacgcaaaaagccgtcgcggcgtatgttgatatcgccagacgtcatggcctggaccctgctcagatggcgctcgcgtttgtacgccgtcaaccgtttgttgccagcactctgctgggcgcaaccacgatggatcagctgaaaactaacatcgaaagtttgcatctggagttaagcgaagacgtattagctgaaattgaagcggtgcatcaggtttatacttatccggcaccataagattaacgccggttaaaaccggcgttaaatattaatgacggcgctgccagatccacagcgccgttattgccagcgcaaacagcgcaccgaagccaatgccaatgggcacgaccgggatgcctatcattaccgccaggctgtaaatgcccagcatcaacaacatggcgctgttttcgccaaggttttgtactgcaatcgcattccccgccccgacgctttttttaccccgctcctgtagcaacgcattgagcggaacgacaaaaaagccccccatcacgccaatcagcatcaacaaggcataggctggcagcagctcgtgttgcagggaaaaaatcagtaccaccacgccaatcaaaatcccggctggcatacagcgactcacggtttccagcgtaactaacttcgctgccgcacctgcgccaaccacgataccaatcgctaccatcgcgttgagataggtgggcgtagcgttatcggtaatgcccagcgccaccggtacccacagcaccaacaggaaacgcagcgtgacacccgctccccagaataaactggtgcccaccaggctaaaacgcgtttcaccattgcgccataggctggtgcaggcattcaggaaactgcgggtcatgttgatgagattccaggactgccccggacgcgccgccgccagtttgggaatgtagatattggcaacgaccgcaccaccgtaggccagtgcgcatgcggccagggcgacgaggacatgccagtcagccagcacaccaccggctacggaaccgagcaaaatcgccgctatggtagaagcttccattaaaccgttagctttcactaacttactacccgtggttaattcgccgagaataccgtatttcgccggactataggctgcagcaccaacacccaccagcgtatagccgagaaacggattgataccaaagcagatactggctgcgcccagcagcttcaggccgttggcaaacatcatcacccggcctttggcgaagctatccgccacctgcccgacaaacggcgcaaaaagaatgtaagcacctacaaacaccatttgcaggatgggctggctccactccggatagaactgcgctttcagtaacgccagagtggcaaacagtagggcattatcgccaaacgcagagagaaactgcgccacgataaccgctttcatccccttgctccacaagctagtgttagtgtgcacactctcactcatcgtgttgttccgcttcgtctacccagcttttcaacgtgacaaagtcaggtttgccgctgccaagtaatggcatctgtttcagatagcgaatatcgcgcggtacagcaagctccggcacgccgtgctcgcgggcatactgttgcaacttatcgcgcgtcagttcgttatctgtggtgaaaagcaccagtgcctcgcctttgctggcatcgctcttaatcgcagtggcatggactttatctgggctaacaccaagtgccagttgttccaccatttccaggctcaccatttcgcctgcaattttggcaaagcgttttgcgcggccctgaatctgcacaaagccctgctcgtcaaaacgcacaatatcgccagtgtcataccagccgcgctccatttcgccgcgaacattctcggcggtgggcacttccagtacacctggcttctccacccgcagatagccgttcattatgttcggccctttcagttgcaggcgtccgccctcttcgataccagggacgctcaacaggcgcgcatccattcctggtagaatacgccctaccgtaccgggtttcgccgccatcggtacgttgatagaaacgacaggcgcgcattcggtcacgccgtagccttcaaggatgcgcaggccaaatttatcctgccaaagctgtttggtactttcttgtaatttttctgcgcctgccaccacatagcgtagacgatagaagtcatacgggttggcgaaacgcgcgtagtgaccgaggaaagtgctggtgccgaacaacacggtgcaactgcggtcatacaccaactccggcacaatgcggtaatgcagcgggcttggataaaggaacacttctgcacctgtaagcagtggcgtaaacaggcctaccgtcagcccaaaggagtgaaacagcggtaacgcgctcataaagcgatcgttggtggtgaagtcggcaatcgttttaatctgctcgacattcgccagaatgcttttatggctatggacgacgcctttcggatggccttcagaaccggaggtaaaaaggatcagcgcctcttcttccggctgctgtttaacctgtgccagacgcggcatcagcaaatgagcgaagatccatactttgtcggcagtggtgacatctgcttttaaatcttccagatagacccagcgcacctgagtaagttgctccggcagatgccagagtttgcctttatcgagaaactggcgggaagtgaagatggttttgatttcagccgccgtaatagcactggtcagcccttttaccccggcagtgtagttcatcattgcgggcatgcggcgacgggcgatggccccaaaaatcactgccgcactgatgcctgcattgggcagcattaagccgatgcgttcgccttcaacactgtatttttcaaggatgcgtccaacaaacagcgttttcgtaagcaatttgcgataggagtctggggtaaagttgacgtcttcgacacatttcttcccggctccgaagcggtacattgcactcagtaaagattcgtacagcgtttcacgcgggcgcaccgccattcgcgcttccatcattatttgatgcagcatttcgccagcgattttgcgacggtcacgggcacgcggcgcatccggcatcgccacctgcgttggtggcaaaatatgcagagtaatttgcgggaacaagcgacgtttaaccagacctttcaggcggctgaagtgcgtaagttccgccccttcaatacgcacaggaataaccgtcgcaccagacttcgccgcgacaaaacccgcgccatcgtagattttcatcaggctgcctgtcgtggtgatgcgtccttcagggaaaatcaccactggtcggccctgttccaccagacgtaccagatgtttaatagccataggttgcgtcgggtcgagaggaacaaagtcgataaaacttttcagccaacgcatataccactgttggcttatactggtgtaaacggcaaacactggacgcacaggtaaaaacagtccaagcaaaatgccatcaataaaagagacgtgattaggcgtaattagaacgcgctcgcccttcagtgcctgggtgtcacccgtaacgcgaacgcgatacaaaacacggcacaaatttcgaaaaaagctaaaaagcattccaactccctttgctctgattcagtaaaagcgaatggagggagattacacgagataaagaacgcgagcgacagtaaattaggtgcgaaaaaaaacctgcgcatccgcgcaggttggtgcaagagacagggtacgaagagcgtaccgaataatctcaccaatcaatacctctgggatcttgattgtggtctgcacgacgactcttcgccagcgagaaaacgcaaaggaatgaagggaaatgcaacgaggtgtgtaaattgtcggttactgttacagattgatgaccggcaaaaaaaacctgcgcatctgcgcaggctggtgtaattcatgtgctcaacccgaagttgacttcacctatcaatacctctgggatcaccactttagcaacctgaagccaaacgccaccagcggtcaatcgcaacagcgtttcgcaaagtgtaaccaaaggtttgcaatctctttttttgtcttacttatttgcgtttggctcacattcccacgatgaaaacacgccaccccttgaaccaacgggcgttttccgtaacactgaaagaatgtaagcgtttacccactaaggtattttcatggcgaccataaaggatgtagcccgactggcaggcgttagtgtcgccaccgtttcccgcgtcattaataatagtcccaaagccagcgaagcttcccggctggctgtgcatagtgcaatggagtctcttagctatcacccgaacgccaacgcccgtgcgctggcgcagcagaccactgaaacggtcggtctggtcgttggtgatgtttccgatccgtttttcggtgcaatggtgaaagcggtcgaacaggtggcttatcacaccggtaattttttattgattggcaacggttaccacaacgaacaaaaagagcgtcaggccattgagcaactgatccgccatcgctgtgctgcgttggtcgtccatgccaaaatgatcccggatgctgatttagccagtttaatgaaacaaatgcccggtatggtgctgatcaaccgtatcctgcctggctttgaaaaccgttgtattgctctggacgatcgttacggtgcctggctggcaacgcgtcatttaattcagcaaggtcatacccgcattggttatctgtgctctaaccactctatttctgacgccgaagatcgtctgcaagggtattacgatgcccttgctgaaagtggtattgcggccaatgaccggctggtgacatttggcgaaccagacgaaagcggcggcgaacaggcaatgaccgagcttttgggacgaggaagaaatttcactgcggtagcctgttataacgatagtatggcggcgggtgcgatgggcgttctcaatgataatggtattgatgtaccgggtgagattagcttaattggctttgatgatgtgctggtgagtcgctatgtgcgtccgcgcctgaccaccgtgcgttacccaatcgtgacgatggcgacccaggctgccgaactggctttggcgctggcggataatcgccctctcccggaaatcactaatgtctttagtccgacgctggtacgtcgtcatagtgtgagtactccgagcctggaggcaagtcatcatgcaaccagcgactaaccgcagttaaagcaattccagcgccagtaattcttcgatggtctggcgacggcgaatcaaccgcgcctgaccattatcaaacagaacttctggtaacagcggacggctattgtagttggaactcatacttgcgccatatgcccctgtatcatgcagtaccagataatcacctgccttcacttccggcaaggcgcgggtttcaacatttcccccttcctgctgggtaaagacatcgccgctttcacataacggtccggcgacgacggtttccaccgttggcgcgtgttccagagaacgaccatcagctgccagggcactgatatggtggtaactaccgtacattgccgggcgcatcagatcgttgaacccggcatcaaccagcacaaagtggcggctccccatttgtttgacgctccgcacctgagtaattaatacgccagactgcgctaccaggaagcgacccggttcaatttccagtttcacagggtggcccaaatggcgggcgatttgctcacgcgcggcattccacagaccataataatgttcggtatcaaccgcctcttcaccctgttgataaggaacagaaagcccaccgcccgcagaaatagcctgtaaatcctgaccgaattcgatgacctgacgcaccatagcaccacacacctgttccagatgggcataatcaacgccagaaccaatgtgcatgtgaatgccgaccagctgcagatgatgacgttgtatcacgtccagtgcggcgggcagatcggtgtaccagataccgtgcttgctgttttcgccaccggtattggttttttggctatgtccgtgaccaaaccccggattaacgcgcagccatacccgatgccctgggctaacctggcccagttggtcgagcatatcaacagaacccgcattcaccggaatttgcaattcactgacgcgttcaagcgtcgcctgatcgataacatctgccgtaaaaacaatatcatcggggtgcgtttgcggattgtaacccgccgccaacgcacgctctatttcgcctaagctgacggaatccactttcacgccctgctcacgcattaagcgcaaaatatgaatattggaacaggctttctgtgcaaagcgcaccacatcaaactgtttcagcgctgcaatctgccgacgaataatttgcgcatcgtagacccacaccgggcagccaaattcagcgggcaaacgcagcagattttcggcggtgagatcggtatcggtgctgaacagactatgtggcataacaaactccagataagtgcttttttatgattacgccacatcataaaaagaataaaaaatatcgatttatgtcgagtctatgcaaaaatgatatggattaccggattgcgagagagcgctaatggccgccgttaacttacgtcatattgaaatttttcatgcggtaatgaccgccggaagcctgactgaggcggcacacctgctacacaccagtcagccaaccgtcagccgcgaacttgcgcgctttgagaaggtgatcgggctgaaattgtttgagcgcgtacgtgggcgattacatcctaccgtgcaaggactgcgtctgtttgaagaagtgcaacgatcctggtacggactggatcgcattgtcagcgccgcagaaagtctgcgcgagtttcgccagggagaactgtctattgcctgcctgccggtctttagccaatcttttttaccgcagctcctgcaaccctttctggcacgttatcccgatgtcagcttaaatatcgtgccccaggaaagtccgctacttgaagagtggctcagcgcccagcgtcatgatttaggactcactgaaacgctccatacgcctgcgggaacagaacgtaccgaattactctctttagatgaagtgtgtgtgttacctccgggtcatccgctggcggtaaaaaaggtattaacgccggatgattttcagggtgagaactacatcagcctttcccgtactgacagctatcgccagttgctggatcagctatttactgaacatcaggttaaacgacgcatgatcgtagaaacccacagcgccgcgagtgtctgcgcaatggtacgggcgggggtaggtattagcgtggttaacccgctcaccgcactagattatgcggcaagcggtttagtggtgcggcggttcagtattgcggttccgttcaccgtcagcctgatccgccccctgcaccgcccgagtagtgcgctggttcaggcgtttagtgggcatttacaagcggggttaccgaaactggtcacttctcttgacgctattttgagcagtgctacgacagcataattagctcagcataaaagcgacagcatcctcggcatggatcgccgcggtatcaaacacaggcaaaacactgcgctcttctggcaccagtaaaccaatttctgtgcagccaaaaatgacgccctgtgcgccctgttctgcaaggcgagcaatcacttgcgcacaataagcgcgactcgcttcggtaaattgccccagacacagttcttcaaaaataatctgattaattttcgcccgttcatccgcttcaggaataagacaattgatggaaaattgttccgtcagccgcccgcgataaaaatcctgttccatggtgtaacgcgtacccagcagcgccacacgagtcattccggccccggtaattgcacgtccggtggcatccgcaatgtgtaagaaaggcagagtgcaacgactctcaatggcatccgccactttatgcatcgtattggtacatagcacaataccttctgcgcccgcccgctgtaagccaagcgccgcctcagccagaatgtccccggttttatcccattccccgcgacgctggcactcttctatttcatgaaaatcgacgctatgtagcagcacttgcgcagagtgaagcccaccaagccgctgtttaatgccttcatttatcaaacgatagtaaggaatggtggattcccagctcattcctcccagcaaaccaattgttttcattcctctctcctgatgtgtgttaccgcaacaaggctgaataaggaacgagacaaacgcctcaacggccaagtgcccaatctctattaacgaaaaaagggccggatgtacagcacatccggcccgtgaaatcagacgccgatatttctcaacttctcgcctgccatcagtttgcgttcgatatgttccagcgtgacatttttggtttccggaatgagccagaaagtaatgcccacaaacgcaatgttcagcgcagtgtagagccagaacgtaccggcagcgccaatgctatcaagcagtgtcaggaaggtcgcgccgataatcatattgctcacccagttcgtggtggtgctacaggtaataccgaaatcgcggcatttcagcggctgaatttcagagcacaggatccacaccactggcgcggcgctcatcgcataaccggcaatacacatcatcgtcatgccaacagagagccaggacaagccactggaagccgtaccgttatcaaactgcatcaggcaatagcccagcaccagagtgcctaacgccatcacgctgaaaccaattttcagagccggtttacgccctgctttatctaccgtaaacaccgcaataaaggtggcgaacataaaggtcagccctacgaccagagtcgcaatcatctgttgttctgtggtcgtaaagcccgccattttgaagatacgcggcgcgtagtacatgatgatgttcataccggtaaactgctgcatcgcctgcaacaacataccgagaaacacagcacgacggacgttacggttgatcttaaacagtgcccaaccgccctgttttaacttcaggctttcacgaatttcgttgagttcttctcgcgctttttcgctcgtatcgcgcagcatacgcaatacttcttccgcctcaatatgacgccccttttccgccagccagcgcgggctatttggcaggaagactaccagaataatcagcagaactgctggtaaagcaagaacccccaacattgcgcgccagttaccgctataactgaacgctgtatcggataaaaacgccagcacgatgccgagtgtgaccatcaactggtacatactgatcatcttaccgcgaacgttttcacttgccatttcagaaagatacagaggagcggtgtaagacgcgatcccgacagcaatgcccagcaccacacgagcggcgattaacatctctacgctggtcgcaaaagcggaccctatagaaccgagtacaaacaggatggcccccgccatcaggctgtatttacgccccaggcggaagctcagccaaccattaaacagcgcaccaattgctgcaccgagcatcatgctactaaccacccattcctgcaaacgactggtcagcacaaagtgatcggtaatgaacggcaacgctccggcgattacgccgatatcaagaccaaataacaatcctgcgaccgcagcagctacgctaacaaacatattcatacgccgcgtatcccgcaaagaacgtggcgttaaagcagattccgtattgatagtaaccattttttcctgccagcagagagtaagacatagtgaaaaaatacgtgaacaactcacgcaggtgtcaggtcggaaacagcataaatatggattaaattgctgcgacatgtcgttatgtgatggatattccaattttcaaattaagttgaattattgagattattattaaccacctaattttacagcagataaaattcataaagttcattaattgataattaatatggattatttcataaccatgatatggattatgatgatctacaggtataaaaaaccctgccatgcggcagggtcataaaagtaagaagaatgaattaacgcgccagccaaccgccatccacggcaatggtataaccattcacataatcactagcgctggaggcaaggaacactatcggccccatcaggtcactcggcagtccccaacgaccagctggaatgcggtcgagaatttccgcgctacgttgttcatctgcccgtagttgttgagtattgttggtcgccatgtaacccggggctatcgcattaacattaatgttgtgtttagcccattcgttcgccatcaatcgcgtcacacccatcacgccgcttttacttgcggtataagaaggcacacggatcccgccctggaaggagagcatactcgcgatattgataatcttgccgccattgccttgcgcgataaagtgtttcgccgctgcctgagacatgaagaatacgctcttgatattcaggttcatgacatcgtcccagtccttttcgctgaactcgagagcatcttcgcggcgaatcaatccggcgttattcaccaggatatcaatatgaccaaactccgctaccgcgcgatccagcagtgctggaataccatcaatctttcgcagatcggcggtcaggcttaaaaaacgacgccccagcgctgtgacctgctcgatggtttcagtcggttcaacgatgttaatgccaacaatgtcacagcccgcttgcgccagccccaacgccatcccctgacccagtccagtatcacaaccagtgacgaccgcaactttaccttcgagagaaaatgcacttaaaatcataacaataccttattcgtttatgcccacaattagcgcaaatctttaacggccacatggtccatatcatcaaagacctggttttcaccgaccatgccccagataaaggtataagctttggttccgacaccggaatggatgctccagctcggggagatcaccgcctgctcgttatgcatcacaatatgacgcgtttcttgcggctgccccatcatgtggaaaacgcaggcgtcatcatccatattgaaatagaaataaacttccatccggcgctcgtgggtgtgacacggcatggtgttccacaagttacccggagccagctccgtcagccccatactcaattggcaggtttccagtacatccgggacaaaatatttgttaatcgtgcgacggttactggtgaggttatcgcctaacgtgactggagatacttcgtccggtgtgacttttttggtgggatacgtcgtatgcgcgggtgcgcaattgtaataaaacttcgccggagtgccggtatcaatactggcaaagacaacttcttttgcacctttaccaacatacagggcgtcgcggtgaccgatttcatagcattggccatcgacagtaatcgtaccggcaccgccaatattgataacacctaactcgcgacgttcaaggaaatagcttacgccgagttgtttaccaacttccccgccaacggaaaccgttttagttatcggcataatgccgccaacaataattcggtcaatgtggctgtaaaccatggtgtactcatcggcgacaaataccttttcaaccaaaaattcattgcgcagcccttgggtatccagcgtttttgcgtgcgcactgtggatgctctgtcttacgtccacatcaacctccgataatcagtgaagcgtgaaaatagaaaacgatagtgaaacactgtttcgttttctctataaagggatgatatgcccatgggctagggttttcaattaaaaataaaacaatgtttcatttttaagttaaggattaaaaaaagtgcagtgtcgatcacgaatatgtcatgagaatggaaaaatgagggagcccagaaaatgtatgtcgacttgccagccatcattattcaacagattaatgacggcagatatttatcggtaaggaggaaatgcagagttattcgtcacgttcaatggtcaatgccacaccctggcccccgccgatacaaagcgttgccagtcctttgcgggcattacgtttcaccatttcatgaaccagagaaaccaggattcggcaaccggaagcgcctatcgggtgaccgagtgcgatcgcgccaccattgacattgacccgacgctcatcccactcaagcatcttgccaacgctaagcgcctgtgcagcaaacgcttcattagcctcgataagatcgacttcagccaactgccagcctacacgctccaggcaacggcgggtcgcatacaccggcgcaattcccatcaatgccggatctacaccaacgctggcaaatgcgcgaatgcgggccagcacgggtaaattcaacgctcgtgctttggcttcgctcatcatcattaccgcagctgcgccatcgtttatggaacttgcattacccgctgtcacagaaccgagactatcaaaactaggatttaaacgggctaagccttctgcgctggcgtcagtgcgtggctgttcatcggtatcaacaaccaacgtctgcccgttactttgggtcattaccgggacgatctcatctttaaatcgtccggcgtcaatcgccgctcgcgctttttgttggctgctaagtgcgtaagcatcctgcaactgacggctgatgccatattcgcgagccagattttcggcggtgacaccaatatgataatcattgaaggcatcccacaacccatcatgcacaagactgtcaaccaactggctattgccaagctgtgcaccggtgcggctatcagtcagaacatgtggtgcgcggctcatgttttcctggccaccggcgatgacaatatcagcctcgccacactgtatcgcctgagtagccagatgcagtgctttaagcccggaaccgcaaacgtcattaatagtgattgcagaaacgctattaggcagaccacctttaatagcgctttgccttgccggattctgccctgcccctgcagtcaacacctgaccaagaattacttcatccaccgcatatgcaggaacgccggtacgttctattaacgctttcacgaccagactaccaagttccacggcggaatgacccgctaacgcaccacgaaagcagccgataggtgtccgtaacgccccgacaatcacaacgtctttcatcacaacctcgcaccaattaacagtgcaatagtaaatgattgttaattacagttatcttaattgtttaaaaaaagtgatttttatcacaaaggaaatatgcctgagcagcagtcagagacataactggcacgtaaggtttgcaaccactaacccaccaatagaggggtagatagggcgttaatctcccatacttaacctggtttatggtaaattgccctccattttgtttaatttgtagatgatacgttcagataatgtctaatatttggtctaaagaagaaactctgtggagtttcgcgctctacggcacagccgttggtgcaggcacgctcttccttcctattcagttaggtagcgcaggggctgtggtcctgtttattactgctctggtcgcctggcctttaacatattggccacataaagccttgtgccagttcatcctcagtagtaaaacaagtgcaggtgaagggataacgggcgcggtaacacactactatggcaagaagattggtaatctgattaccacgctgtacttcatcgccttttttgtcgtcgtgttgatatatgcagtggcaattaccaacagtcttacggaacagctggcaaagcatatggttattgatcttcgcatccgtatgttggtgagtctgggtgttgtattaattctgaatctcatttttctgatgggacgtcatgccactattcgggtaatgggatttttggtattcccattgattgcctatttcttatttctttccatttaccttgtcggtagttggcaacctgatctattaacaacccaggtagagttcaatcagaatacccttcaccagatatggataagcattcccgtgatggttttcgcctttagccatacgcccattatttctacgtttgccatagacagacgtgaaaaatatggcgaacacgctatggataaatgcaaaaaaattatgaaagtcgcttatctcatcatctgcataagtgtactgttctttgtctttagctgcctgctttctattccacctagctatattgaagctgctaaagaagaaggggtcaccattttaagcgcgctttctatgctgccgaacgccccagcatggttgagtatttccgggattattgtcgcagtagttgcgatgagcaaaagtttcctgggtacgtactttggcgttattgaaggtgccacagaggtcgtcaaaacaacactacagcaggttggtgtaaagaaaagtcgtgcatttaaccgcgcactaagtattatgttggtaagcctgattaccttcattgtttgttgcattaacccgaacgcgattagcatgatttacgcgatcagcggcccgctcattgccatgatacttttcatcatgcctacgctgagtacgtatctcatcccggcgcttaaaccctggcgttccatcggaaatctgattacgctgatcgtgggtatcctgtgcgtaagcgtaatgttctttagctaatatcagttgtggatggttcaaaattgctacaattttgaaccattccatttttcataatattcatttgttattattccaccctatcacttctctcgtcatatcctagtattatcagttagttaaacacacaaagagatctgaacatcttaaataagactatttaagatgcataacttagattcgcaagatatcttctggtcattcaaaaacaatttgcgatatagatattcttataccatgagatagttatctggaccgctctcaaccatgcaagattaaatcagtgaaacataatcatatttgataacgagaaatgcatttttaaatgccttactcagaattatagcaaatacagattaatcgcaatttttcccggcaaaattacaaaatcatggtgtattgacatcatcaataaccaatgaaattatgcaattatatacggatagggaggttcttaacatggggctttgtagtcgttataaaagtcttacatgcaatagttgcagtatgcattgccaaataatgccagaagagagtccgcgtttgcagtattgcgcaaacagctgtttttgtatgtggcccgaagaaagtagttattttaatcgtggtgtggtagaaggtatcttaacaaaaaaccacaatgcgagattaagcggatatatttttgtcgattttagtgtaagttttttacgtctattccttgaaaaagactggattgactatcttgcaagtactgacatggggattgttttagtcagcgaccgcaatatgcaaagcttagctaattactggcgaaaacacaacagtgcaatatctgctgtcatatataatgatgatggtcttgatgttgccaatgaaaagatcagacaactatttattggtcgttatttaagttttaccggaggtaacacattaactcagatggaattcaccataatggggtatatggtttctggttataatccatatcagattgctgaagttctggatatggatatccgtagcatctacgcgtacaagcaacgaatcgaaaagagaatgggtggtaaaataaacgaattatttattcgtagtcatagcgtccaacattgatactcaacgaccagccagaatcatactctgtttatacgggcatttattgaaatgtccgtattttataaataggccgtcccctcaagagtaaacaccatagtatttaaaaccatcacacgaaaaattcagaagcattacgaaatatgaatttacaaacaatagtggcataaatgttaaccatgttaatttacgtaaagttttacgttgcaacattaaagcctcatttcaatcatcatgataaatataaaattaatatatatttatgccgtaaataccaatatacttagcaaactatgtgatctccatttcgattgatttagtgtttattgacgtatgtactggattattaacgataatatcgagttctggcctgagcaccgaaaattaataagcgtacataacgccgatcttaacgtcgttctgacaacgccagccagtcgatgtttaagtcttctacttgaagcttttcctgatgtggttgcacaacaagattttttcaccagagtctgggaagaagaaggtatgcgtgtgcctactaacacgttatatcagaacatatccattatcagacgcggatttcgcgctgttggtgatactacccacagcctaattgcaaccgtgccgagaagaggattcaagatccataatgacattaacatacaaaatcatgtaataaacagcagtacagacgcacatacacacaatgccccacctgccataaaagttaatgcgggatacaaagagagcattggtggcgcaaagaatttcaataacaaaatcctcaaacatataaaaagtcatctaattatgttgagcgcatttgtcataggcgcatattctgcatattggctatggaataataatcaaccgaagccatttttcaaggattacaagactgttgcggaaattaatggctgccattttaatgtaacagaagatacaattgatgggttgaaagagttcgataaatataaaacacggatactggatagcgggattaactgtaaaaaacatccgtggttatacttccctcttgcaaaatccagtccggggatgattgttatggcatgcaataaaaactataaccaacatgaagtggcaaactgtttaaccctgtcttaccgtgaggttaatcgtgattgattataaaaaaaacttattatttattttagtttttatcagtgggtttattctcttcactgtctattcttacactgcagaaaaaatgatatataacgaaacatgcactgcaaattgggtaatttttaatgaccagggacgagcaaatcttaccatcgactttatgtataacaaaaaaaataaaacaggaactgttgcgttgagtggaacctggcaacaaggtaacagagaaagtaaaagtatacggcgaaatattgaatacacatggattgaaaactatgacacagcccatttaacaagtaagaaagttaataagtttgagattatggatcaagttgatgatgatagacttgcacaacttattcctgatttttatgtctttccagaaaaaagtgtaagctataatatactaaagcaaggtaagcatgcttttattttgagcattggtaacagagcaataatgcattgtgcaaggtaaactaaaatagataacaaaaagatggaacctcgttaatcataaaacaataaaattaaatattctcgcagtatatggcagtctaaagcatcaaagatttgatcaacatctttcattttagacatctccttgcaatgtaaaatatcatgtatcaacaacatctggtgcaaatccaactgtcgaactcgacattcatcttagctcgattattattccttcgtacagtgcttgtaaacaatacagaaagaggattattaagaaccagtttactcagactatcaatagaggaaaggactaacgtttctttaaaagaattgatttcatcatctgttaaactaaactcatcattgacagatcgactgatataactgtttttaactttactctttacgttgactttattgacagaattaacattcacatatctactatttaatgtccaacttgttgtttgcgtgagaacattctcagcattaaggaatttttttaacggaatccttggtttctttttgctgtcgctatttacaatatcatgcatatagaccatttcatgaatctggctaaattcaatgtccattgtatacctcacatttttaccgtgactcgatgttactgttcaataatcaccttccatcaatactaaaattaatacccctaatgtgccgataacaaatatagtcattctacgtaacgtctccataaggtgatatttgacattatcagaagctgcgaattcggattttgctctaatcaaatgagagaaatgtaaaatgaagccacgaaatattaataatagcctaccactgcaaccattagttcctgatcaggagaacaaaaataagaaaaatgaagagaaatccgttaatccagttaaaatcacaatggggtctggtttaaattatattgaacaagaatctcttggaggaaaatatctaacacatgatttgagtataaagatagcggatatttctgaagagataattcagcaagcaatattatctgctatgagcatatataaatttagcataacagatgatttaatgagtatggctgtaaatgaactcataaaactgaccaaaatagagaataatgtagacctgaataaattcactactatatgcacagacgttctatccccccgcgtcaccagacataataaagaaaaaaacaaacgacattctacccttctcaaaaatcccctttttaattttcattgaaaaaatggcaattgatactatgaatccaggtcatacacattaaggcatttatgtaatgtcgtaattaagataactaataaggtgaatattagtaaaacaactaatgatgttattagtttgtagtgaacagtacttttaccaataatgaaaaatataccataagcaatgcaagcttaaaactcataatttaaaaaagataaatataaaaatatcaatgagtcaatcaataataatttggcatcacgagacacatcacagaggaatattatgagcacagaaacaattgaaatattcaataatagtgatgaatgggcaaatcaactaaaacacgcattaagcaaaggagaaaatctggcattactacatggtttaactcctgatatccttgatagaatatatgcatatgcattcgactaccatgaaaagggtaatataacggacgcagaaatttattataaattcttgtgcatttatgcgttcgaaaatcatgagtatctaaaagattttgcaagtgtatgtcagcccaaaaagaaatatcaacaagcatatgacctttacaaactaagttacaattacttcccgtatgatgactatagtgttatttatcgtatgggtcaatgtcagattggggctaaaaatatcgataacgcaatgcaatgtttctatcacattattaacaattgtgaggatgatagtgttaagagtaaagcgcaggcatatattgaactcttaaacgataatagtgaagataatggctaagcattacaatcatttggttaaatttgctggttatagtgcagttaaccactataaccagcacctcttatgttttcttaaatcagcatcttaaaacagttaagagcatactataaatcattatttttcaatgcgttagagaacaatctactttatcaaaattgaataaggctatttcagattacatcactgaattcctaagataaattagtgaacacaaccatagatatgtcaaatgtaatttcctgtagcgttaatgacacataaatatgaatagccataatttctattgcttaagcaggatgcaagaaaccaattttttcatagaggttaactaatggacttagaaaataaattcagttatcattttcttgagggattaacgctcacggaagatggaattcttactcaaggaaatgagcaagtttatattccacagaaagagttaggtgtattaatagtattacttgaatccgctggtcatgttgtactgaaagatatgatcatcgaaagtgtatggaaaaatattattgttagtgacgagtccctgacaagatgtatctattctttgcgctgcatttttgaaaaaattggctatgatcgttgcatagaaacaatctaccggaaaggttatcgtttcagcgggcaggttttcaaaactaaaattaatgaagataatactagtgactattccatagctatattccctttcactactagtttgaatacactggatccattaatacttaatcaggaattagtgcaaatcattagtaataaaaaaatcgatggtctctatacctatccgatggctgcgacaaatttttgtaatgatcacatatctcaaaatagtttcttgagcagattcaagccagattatttcgttacaggaagaataaaccagaataatgcagtgaacactttatacattgagttgatcgacgctaaaaaccttttcctcatcgccagtaatcatctccctgttgatgaactacataatacaagtcaatttattatagataatatccttcaaacggtacataaaccagaacgatctgtaagattagctaagcaggaccaaggatataagaatcattatttaagtgatgaaatgttagccggaaagaaagaactttacgacttcacccctgaaagcatttacagggccatgactatatttgatagattacaaaataaaagtgatatacagacgctaaaaacagaatgttattgccttctagcggaatgccatatgtctttggcacttcatggaaaaagtgaacttgaacttgctgctcaaaaagcattagagcttttagattatgtaagtgacataaccactgtcgatggaaaaattttagctattatgggactgataactggtctgtctggacaagcaaaagtatctcatatcttatttgaacaggctaagatacacagtactgatatagcctctctctactactatagggcactagtccactttcataatgaaaaaattgaagaggcaaggatttgtatagacaaaagtctacaactcgaacccagaagacgaaaagcagttgtgataaaagaatgtgtagatatgtatgtgcctaacccgctcaaaaacaacattaaactctactataaagaaactgagagtgaaagccatcgagttataattgacaacattttgaaattaaagcagctgacgagaatttgtatgcgataaatttttattgacgcaattttattatttagatgtatgcaacttgttatttaaacaacagagataaaaatatctaagatattcaccttattgcaagatatttaaaatgctctagagttaaaagtatgatgtaaagaccattggcctggacaattaaaaaagggagctttatgactaatccaatcggtatcaataatttatctcaaagtagtaatatagcgaatgcaacgggtgatgaagtcgtaagtttagataaacacatcaacaccagtgctactgatacagatcaaatacaagcatttatagttagtacatggatggcgccttttcaaaatgatatgtatagtgaagataatcctatcagtccttactataaaattgagtggtaaacgattgaccaaataaatcataacgagatacttttataatagtatctcgttcctttcattcaatcctcacacatgaaaaaatatgcgctcaccaaaagttaaattcttaaccatcttcacgttttgtatatttattacaaaaatgtctttcgccagcaactcttgctctaatgaagcaggaacaatgttcagaatcgaaccaaatttaattaaagctatcgctcttgttgaaagcaatctaaaaaaggatagcataggcaagaacagagataagaataacaatataaagagtttagattattggttaatgcagataaaccagatgcatattcccctgttaaaaaaacgtggaataataaaagatgaacgagatttgttagataacccttgtctgaacattaaaataggaaccgagattttatataaccattttagtcgttgtggagtaacgtggcaatgcctggggacttataatgcgggttttgcaatggataaccaaaaaaagagacagcaatatgccccaaaatatatattgtatataccaggcttaatgaactaaacaatcgtaaggcttcagcaaaatgagcctaaagcctcttttttttatatagtgcaaacacccatacgtaaagctgttttgatcaactcgataccactgtgaacatctaatttcttcatgatattgagtctatgagtttcgactgttttcctgcttaactgcaagaaattagcgatttctttgtttgttttaccatcagctatgagttgtaatatttcactctcacgatttgtaagttgattatcagaggaatacctggaagatattttttcacaatccatatgtacactatcaaaataagtgtaaccattactaatgctatcaatagcacgatttagtttcgccgggtgactggttttccatacgcatcctttcgcacctgcttcaagcaattttatactatcaatatacggcatctttgctacaaatgtaataatatgagcatctatcttatggcttttaacccattttacgagttcggcccccatcattccacctgcaaattctcctaaaataaatatttaggctgtagatttgttacactccgctatagctttcttcagatctttatagcccacttatttaacaacttgaaaataaggtgttttacctgggttgttacaaaaggattgcattgcgtaaacgctttttatttacaacaaaatggggaagtattacggcgaagataaattggagcgggcgaagggaatcgaaccctcgtatagagcttgggaagctctcgttctaccattgaactacgcccgcttcgagatgcgtaaggcattataaaccttacgctctccttagcaagtgccacgctgctgactgctgattaattcgccatcagcattttggcttgctgccctgaggcggcaagtaacgtagcggatcaattgccgttgcacggtaacgaatctggaaatgcaggcgaacagatgccgcatccgtgctccccatagtggcgattttttgcccagccttcacgctttgcccattatttaccagcatcgtgtcattatgggcgtaagccgtaatgtaatcttcactgtgtttaatcatgatgagattaccgtagccacgcagctggttgcccacatacaccacctttcctgcacccgcggcgtaaataggtgtaccccgtggagcactgatatcaatccctttattgccgccatctgctgtgctatacggcatgataactttccctgtcgttggccataaccaacaacgttgccctactggcggccaggaacttttcggtaccgcactactcggtgtaacgcttgcggttttggtcgtacttttggcggtacttttacgtgtaatactgctacttttcgccccacccagttttagtttctgaccaacttcaatggtgtaagggggggaaatgccgttcagtcgcgccagttcttttacgctggttcccgtggtgcggctaatacgatatagcgtatccccccgtttcacggtgtaaacggagccggaatacgttcctgtatcggaacttttgctaccgctacagcccgccaaaagcagtccaacgcttaacaacatcacgatacccagagattttttattcaggcgtcccgcactcaaaatctttcctcgcttaaaaaacaagacgccttatcatagcagccagcctcttgatacccaatctcttgcttctggaaaaacgtggtaatagagaaagaggttaatttcatttggcaaagggaagtatcatcagcaaaatattcgctgtagaggtatcgaacttcctgactttttaccctatttcccatcctgatgcgtaataatcccaatttatcacattgattttatcgccactcatattgatacgtatcactgcccctattcagagtcctgtttcgtatcatatctgtgtttttttaacgtcatcacacttcctacctcccctaacgcttatcgtcgtttctggcgtaaatcttgcctgcttagactaaatctttgccataagaaccaaatgttcaaatcgaggggatttctatggaagcgcgggaagcaaccgctacgggtgaatcatgcatgcgcgtcgatgccattgctaaggtcaccgggcgggcacgatatactgacgattatgttatggcgggcatgtgttatgcgaaatatgtacgtagccctatcgcacatggttatgccgtaagtattaatgatgaacaagccagaagtttgccgggcgtactggcgatttttacctgggaagatgtgcctgatattccattcgctacagctgggcatgcctggacacttgacgaaaacaagcgcgataccgccgatcgcgcactgctaactcgccatgttcgtcatcatggtgacgccgttgccatcgtcgtggcccgcgatgaactcacggcagaaaaagcggcgcaattggtcagcattgagtggcaagaattacccgttatcaccacgccagaagcggcgctggcagaagacgctgcaccaatccataacggtggcaatttactgaaacaaagcacgatgagcacgggtaatgtccaacaaacaatcgatgccgccgactaccaggtacaggggcactatcagacccccgttattcaacattgtcacatggaaagcgtaacaagcctggcgtggatggaggatgacagccgaattaccatcgtttccagcacccagatcccgcacattgttcgccgcgtggttggtcaggcgctggatattccctggagttgcgtacgagtcatcaaaccatttgtcggtggcggttttggtaataaacaggatgtactggaagagccaatggcggcattcctgaccagcaagcttggcggcattccggtgaaagtttcccttagccgtgaagagtgtttcctcgcaacccgtacccgccacgcttttaccattgacgggcaaatgggcgtgaaccgcgacggaacattgaaaggttatagtctggatgttctgtctaacaccggcgcttatgcatctcacgggcactccatcgcttctgcgggggggaataaagtcgcttacctttatcctcgttgtgcctacgcttacagtagtaagacctgctataccaacctccccagcgctggtgcgatgcgtggttatggcgcgccacaagtcgtatttgccgttgagtctatgcttgatgacgccgcgacagcgttaggtattgatcctgttgaaattcgtttacgcaacgccgcccgcgaaggagatgctaatccgctcacgggcaaacgtatttacagcgcagggttgccggagtgtcttgaaaaaggccggaaaatctttgaatgggaaaaacgccgtgcagaatgccagaaccagcaaggcaatttgcgccgcggcgttggcgtcgcctgttttagctacacctctaacacctggcctgtcggcgtagaaatagcaggcgcgcgccttctgatgaatcaggatggaaccatcaacgtgcaaagcggcgcgacggaaatcggtcagggtgccgacaccgtcttcagccaaatggtggcagaaaccgtgggggttccggtcagcgacgttcgcgttattagtactcaagataccgacgttacgccgttcgatcccggcgcatttgccagtcgccagagctatgttgccgcgcctgcgctgcgcagtgcggcactattattaaaagagaaaatcatcgctcacgccgcagtcatgctacatcagagtgcgatgaatctgaccctgataaaaggccatatcgtgctggttgaacgaccggaagagccgttaatgagcttaaaagatttggcgatggacgctttctaccaccctgaacgcggcgggcagctctctgctgaaagctccatcaaaaccaccactaacccaccggcgtttggctgtacctttgttgatctgacggtcgatattgcgctgtgcaaagtcaccatcaaccgcatcctcaacgttcatgatagtgggcatattcttaatccactgctggcagaaggtcaggtacacggcggaatgggaatgggcattggctgggcgctatttgaagagatgatcatcgatgctaaaagcggcgtggtccgtaaccccaatctgctggattacaaaatgccgaccatgccggatctgccacaactggaaagcgcgttcgtcgaaatcaatgagccgcaatccgcatacggacataagagtctgggtgagccaccaataattcctgttgccgctgctattcgtaacgcggtgaagatggctaccggtgttgcaatcaatacactgccgctgacgccaaaacggttatatgaagagttccatctggcaggattgatttgaggataacatcatgtttgattttgcttcttaccatcgcgcagcaacccttgccgatgccatcaacctgctggctgacaacccgcaggccaaactgctcgccggtggcactgacgtactgattcagctccaccatcacaatgaccgttatcgccatattgttgatattcataatctggcggagctgcggggaattacgctggcggaagatggcagcctacgtatcggctctgcaacgacatttacccagctaatagaagatcctataactcaacgtcatctcccggcgttatgtgctgcggccacgtccattgctggaccgcagatccgtaacgtcgctacctacggtggaaatatttgcaacggtgccaccagcgcagattctgccacgccaacgctaatttatgacgcgaaactggagatccactccccgcgcggtgttcgtttcgtcccgattaatggctttcacaccgggccgggcaaagtgtctcttgagcatgacgaaatcctcgtcgcctttcattttccgccacagccgaaagaacacgcgggcagcgcgcattttaaatatgccatgcgcgacgcaatggatattagtacgattggctgcgccgcacattgccgactggataacggcaatttcagcgaattacgcctggcatttggtgttgccgcgccaacgccgattcgctgccaacatgccgaacagactgcacaaaatgcgccattaaacctgcaaacgctggaagctatcagcgaatctgtcctgcaagatgtcgccccgcgttctagttggcgggccagtaaagagtttcgtctgcatctcatccagacgatgaccaaaaaagtgattagcgaagccgtcgccgcggcggggggaaaattgcaatgaatcacagcgaaacaattaccatcgaatgcaccattaacgggatgccttttcagcttcacgccgcaccaggcacgccgctcagcgaattactccgcgaacaaggactgctaagtgtcaaacaagggtgctgcgtgggtgaatgtggtgcctgtacggtgttggtcgacggcacagcaatagacagttgcttataccttgccgcctgggctgaaggaaaagagatccgcacgctggaaggtgaagcgaaaggcggaaaactttctcatgttcagcaggcttatgcgaaatccggcgcagtgcagtgcgggttttgtacgcctggcctgattatggctaccacggcaatgctggcgaaaccacgcgagaagccattaaccattacggaaattcgtcgcggactggcgggaaatctttgtcgctgcacggggtatcagatgattgtaaatacagttctggattgcgagaaaacgaagtaaaaggatatccggcctgaattcaggccggattcactgaggttatgtgtttaacaactcatatttcttaatcttgcgatagagcgtagcaatgccgatgcccagttcatcagcaacttgcttcttgctgttatgacgactaagcgcctcgcggatcatttgcttttccatctcctccagcgccgtgccgcccgcatcatcgagactcaggtgcgcctcactgacctctgttacatcactttgctccgttgtgccattattcagcagatttggcggcaatagcgtgctgtcgataacttcaccactaggaaccacgttaaccagatattccatcaaattgcttaactcgcgcaggtttccgggccaacgatgcttacgcaatatttcgacgacatcgggagcaatgccaggataaacgcttcccagacgacgggtatgcagatgtaaaaagtaatgcaccaatagttcaatatcttcctgacgttcacgcagcggtggcagagttatcgggataacattaagtcggtagaagagatcttcgcggaatttaccttcggcaatgaactgggccaaattctgattagttgcagaaatgatgcgaatgtcgacttgtattgggctactggcaccaatcggcagaatttcacgtgcctcaatagcgcgcagtaatttagcctgcaacattaatggcatatcacctatttcatcgagaaacagcgtgcccgtattcgccgcctgaatcaaccctgttttaccgttggcagaagcgccagtaaatgcacctttaacataaccgaacagttcgctctccagaagctgctccggaatcgcggcacagttgatagcaataaagggtttattccgtcttccgctcaacttatggattgcacgggcgacgacttctttacccgtgccgctttcaccaaccaccataacgctggatgggctgggtgcaatacggctaatgagtcgttttaattgccgcataacacggcactcgccaaccaattgttcaatatgcggttcatcaggtgcatttgctacagaaaaactggtatggctttggtgaaacgccattaaaaataattgtcggccctgaatgttatgcaattgaccaatgattaattcacttttatcgtcccaactaacaatatgctgcatatgtccatgggtaaaattactctcaaatgttaatggtctgaaacggataggtttcccaataatattattttgcacaacaccaagtgtttttaaggcagtctgattaacaaactgaacccgattttcatcatctacaactaatacgccctgatccatattatcgatcatggtcgcaaatattttactgatgttatctcctggcccctgatcctccagaagtttgctaacaaaaatggtggatatatggcgaacataatcagaaaattcgcgtaaattatcactgatatgctcttgttgctcgtgggtaacggcaatcaaacttatcaccccaacacaacgatcctgtaaaatgacaggcgtacccagaaatgctttttcgcggcaattttctttactatcgcaaccttcgcaaaggggatcgaagcgagactgtgtcacaactttttcagttttcgtttccaggacgtggcggagcaggcgactgttgccgctcaactggcgaccaagaaacttcccatacgcgcccgttccggcaacgcgacacaagttttcatcaacgatctcaacctcaagctgcaaaaacgctggcaagcattctggcaaaacgctgaattgtcggttgaatttgcatcaatacactctgcgtagtagcaagctccatagctttaccttccagacttacttaaaagtcgatcattgaagacgttgatggttcacagatcatgatgatattaactcaggcgaaattggctttgataaaaacataagatttttatcattttctaatgaaattatggaagagatatcacatttctatatcaatatgagaattacggcggtgagtttatcaaactgaagagagatagcctgcccctttatcttatttctgatacttagcagcaaataaataacgcgataaaaaaagccaaacgttttcgtattttacaaacaaccagaagctggcatcaatttgtgatcaaccccacacattatccgtcaaattagtcttttgcagccgcgcggataattctggcacacttattgttagtcccaggtatagctgtgaaaacaccaatcactttggcaagtcacagtgaaataaaccactttgcctgtcattccactaccgggactttatgatgaaaactgttaatgagctgattaaggatatcaatagcctgacctctcaccttcacgagaaagattttttgttaacgtgggaacagacgccagatgaactgaaacaagtactggacgttgccgcagcattaaaagcactgcgtgctgaaaacatcagtaccaaagtctttaatagtggattaggtatttccgtattccgcgacaactccacccgtacccgcttctcttatgcttccgcgcttaacctgctcggccttgcacaacaagatctcgacgaaggcaaaagtcaaatcgctcacggcgaaaccgtgcgtgaaaccgccaatatgatctccttctgcgccgacgctattggtattcgcgacgatatgtatctgggcgcaggcaacgcctatatgcgtgaagttggcgctgcacttgatgacggttacaagcagggtgtactgccacagcgtccggctttagtgaacctgcaatgcgatattgaccacccgactcagagtatggctgacctcgcgtggttacgtgaacactttggtagtctggaaaacctgaaaggtaaaaaaatcgccatgacctgggcctactctccaagctatggcaaaccgctctctgtaccacaaggcatcatcggtctgatgactcgcttcggtatggatgtcaccctggcccatccggaaggctacgacctgatcccggatgtggttgaagtggcgaaaaacaatgctaaagcctccggtggtagcttccgtcaggtcaccagcatggaagaagccttcaaagacgcagacatcgtttatccgaagagttgggcaccttacaaagtgatggaagagcgtactgaattgctgcgtgcgaacgatcacgaaggcttaaaagcactggaaaaacagtgtctggcacagaacgcgcaacacaaagactggcattgtactgaagagatgatggaactgacccgtgatggcgaagccctgtacatgcactgcctgccagctgatatcagcggcgtatcctgtaaagaaggtgaagtgactgaaggcgtattcgaaaaataccgtatcgctacctacaaagaagccagctggaagccttatatcatcgccgcgatgatcctgtcccgtaaatacgccaaaccaggtgcactgctcgagcaactgctgaaagaagcgcaagaacgcgtgaaataacccctcgggccgatcagctggtcggccctctatttccagaggccaaaaggataggatatgtccgttttcagtttgaagattgatatcgccgataacaaatttttcaacggcgaaacaagtccgctctttagccaaagccaggccaaactggcgcgccagttccaccagaaaatagctggttatcgcccaacaccgctttgtgcgctggacgatctcgcaaacctttttggtgtgaagaaaattctcgtcaaagacgaaagtaaacgattcggtctgaacgccttcaaaatgcttggcggtgcgtacgccatcgctcaattattgtgtgaaaaatatcatcttgatatcgaaacgctgagttttgagcacctgaaaaatgccatcggcgaaaaaatgactttcgcgaccaccaccgacggcaaccacgggcgcggtgtggcgtgggcagcacagcaactcggacagaatgcggtgatttacatgccgaaaggttctgctcaggaacgcgttgacgccattctgaacctcggtgccgagtgcatcgtcacggatatgaactatgacgataccgttcgcctgaccatgcaacacgcgcagcagcacggctgggaagtggtacaggacacggcatgggaaggttacaccaaaatcccaacctggatcatgcaaggctacgcaaccctggcagatgaagccgtcgagcaaatgcgtgaaatgggcgtaaccccgacgcacgttctgctgcaagccggtgtcggagcaatggccggtggtgtgctgggttatctggtcgacgtctatagcccgcaaaatctgcacagcattattgttgaacctgacaaagctgactgtatttatcgctccggcgtcaaaggcgacatcgtcaacgttggcggtgatatggccaccatcatggcaggcctggcctgtggcgaacctaacccgctgggctgggaaatcctacgtaactgcgccacccaattcatctcctgccaggacagcgttgccgcattaggtatgcgcgtgctgggtaatccgtacggcaacgacccgcgcatcatctccggtgaatccggcgctgtcggtttgggcgttctcgcagcggttcattatcacccgcaacgtcaaagcctgatggaaaaactggcgctgaacaaagatgccgtggtgctggttatcagcactgaaggcgacaccgacgtgaagcactaccgcgaagttgtctgggaaggcaaacacgctgtagcaccttaatcaccctattggaactgctccctgcaaaacggggagtaaaaaatctggagaaaaataatggctaagaatattccattcaaactgattcttgaaaaagcaaaagattaccaggcggatatgactcgcttcctgcgcgacatggttgctattcccagtgaaagctgcgacgagaaacgcgtagtacatcgtattaaagaagagatggaaaaagtcggcttcgataaagttgaaatcgacccgatgggcaacgttctcggttatatcggccacggcccgcgtctggtggcaatggacgctcatatcgataccgtcggcattggcaacatcaaaaactgggacttcgatccgtacgaaggcatggaaactgatgaactgattggtggtcgcggtacttccgaccaggaaggtggcatggcctctatggtttatgccggtaaaatcattaaagacctcggtctggaagatgaatataccctgctggttaccggtacggtgcaggaagaagactgcgacggtctgtgctggcagtacattattgaacaatccggcattcgcccggaatttgtggtcagtaccgaaccaaccgactgccaggtataccgtggtcagcgcggtcgtatggaaattcgtattgatgttcagggtgttagctgccacggttctgcaccagaacgcggtgataacgccattttcaaaatgggtccgattcttggcgaattacaagaactctcccaacgtctgggttatgacgaattcctcggcaaaggcaccctcaccgtttctgaaatcttcttcacatccccaagccgttgcgctgtagcagacagctgcgcagttagtatcgaccgtcgtctgacccggggcgaaacctgggaaggcgcgctggacgaaatccgcgccctgcctgcagtacagaaagctaacgcggttgtttctatgtacaactacgaccgtccgtcctggactggcctggtttacccaaccgaatgctacttcccgacctggaaagtggaagaagatcacttcaccgttaaagcactggtgaatgcctacgaagggctgtttggcaaagcgccggttgttgataagtggaccttcagtactaacggcgtatctatcatgggccgtcacggcattccggtgatcggctttggcccgggtaaagaacctgaagcgcatgcacctaacgaaaaaacctggaaatctcacctggtgacctgtgccgcgatgtacgctgcaatcccgttaagctggctggcaacagagtaattactcttcacttattcccctccggttcgccggagggtttttggagtttgctatgcgcgtattgatcaaaaacggcactgtcgttaacgcagatggacaagccaaacaggatttgctgattgaaagcgggattgttcgccagttgggcaacaatattagcccgcagctcccgtatgaagaaattgatgccactggctgttacgttttccctggcggcgtggatgtccatacgcatttcaatattgatgtcggcatcgcgcgcagttgtgatgatttttttaccggtacccgcgcagctgcgtgtggcggtacaacaaccattattgaccatatgggatttggcccaaacggctgtcggttacgccatcaactggaggtttatcgtggttatgccgcccataaagcggtcatcgattacagctttcacggtgtgatccagcacattaatcacgcaatcctcgacgaaatcccgatgatagtcgaggaaggactgagcagttttaaactctatttaacctatcaatacaaactcaacgatgacgaggttttgcaggcattacgccgcttgcatgaatccggcgcgctgaccaccgtgcacccggaaaatgatgcggctatcgccagcaagcgggcggaatttatcgccgcagggttaaccgcgccgcgctatcatgccttgagtcgccctctggaatgcgaagcggaagccatcgcccgcatgattaacctggcacaaattgccggtaacgccccgctctatatcgtgcacctgtctaacggcttaggtctggattatctgcgtcttgcccgtgcgaatcaccagccagtctgggttgaaacctgcccacaatatctcctgttggacgaacgcagttacgatacagaagatggcatgaagttcattcttagcccaccgctgcgtaacgtacgcgagcaggacaaactgtggtgtggcatcagcgatggtgcgattgacgtggtggcaaccgatcactgcaccttcagcatggctcaacgcctgcaaatttctaaaggcgatttcagtcgctgcccaaatggcttacccggtgtggaaaaccgcatgcagttactgttttccagtggcgtgatgacgggacgtataacaccggaacgctttgttgaattaaccagcgcaatgcccgccaggttgtttggcctgtggccgcaaaaaggattattagcgcccggttccgacggcgacgtggtgattatcgacccacgtcagagccaacaaattcagcatcgccatctccacgacaacgccgactacagcccatgggagggttttacctgtcagggcgcgattgtcagaaccttatcccgtggtgaaacgattttctgtgacggcacctttacaggcaaagccgggcgaggtcgtttcctgcgacgcaaaccgtttgtccctcccgtgctctaaccactgccagggatctatacacaatcaagaatgatgagtgaggaaaaatgagtaagaaaattgttctcgccctgggcgggaatgcgctgggcgatgacctggccgggcaaatgaaagcggtaaaaattacttctcaggcaattgttgatttaattgcccagggacatgaagttatcgtcactcatggtaacgggccgcaggtgggcatgattaaccaggcctttgaagctgccgcaaaaactgaagcgcacagcccaatgctgccgatgtctgtctgtgttgcattaagccagggttatattggttacgatctacaaaacgctttaagagaagaactgctttctcggggcattaataaacctgtagcaacgctggttactcaggtcgaagtcgacgctaacgatccggcattcctcaacccgaccaagccgatcggtagcttctttaccgagcaagaagcagagcaactgacaaaacagggttacactctgaaagaagatgctggtcgcggctatcgccgtgttgttgccagcccaaaaccggttgatatcattgaaaaagaaacggttaaagctctggtagatgcaggtcaggtggtgatcaccgttggcggtggtggtatccctgttattcgtgaaggtaaccatctgcgtggtgccagcgcggttatcgataaagactgggccagcgcccgtttagcagaaatgattgatgccgatatgctgatcattctgactgcggtagaaaaagtggccattaacttcggtaaagagaatgaacagtggctcgatcgcctgagtttaagtgatgctgaacgctttatcgaagaaggtcattttgcgaaaggttctatgctgcctaaagtggaagctgccgccagctttgctcgctctcgcgcaggtcgtgaagcactgattaccgtattgagcaaagcgaaagaagggattgaaggcaaaacaggaacggtgatttgtcagtaatttaaaggccgggtgggtaataccatccggccaaagattgtcaagtaagtgcgctttgttgatgccggatgcggcgcgagcgccttatccgtcctacaaaacatcgcaaattcaatagattgcaatgcacttgtaggcctgataagcgtagcgcatcaggcaatttggcgtttgtcatcagtctcaggccgggtgggtaataccatccggccattttcatttaagccacttccagcacttcttttgtcgctttcacgccctgatgcatcaacatcattaacgcctcaagtacgccgccgccaatcgcccgggctttatcagaaacgctggtgaaatcagcggtttcaccacgaggatcgatatcaccaattttaaaaccaccaaccactgccaggccgtcgttcaacaagccacgcaccatccccgtcaacggtgctttaatttcatgctcaccaatccaggcaatcacatcgccctctttcaccagatcgcctaatttcacgttggatcgcataatgcctgcagcaggagcacggatcacccgtcgggtggtatgccccataatattgccaggaacaccggtattctcctgcgcacaaccagagtaaatcacctgaccgagccagtgcccgcgatttgtttcaattaccgcatgacaatccttcccagcagtaaagcccggcccaagcgcgattgttactggtgccatatctgcccgcgttcccaaattctgtttcgccagaatagcgtccaccacgcaaagcggtttcagttcatcaagcaaactacaggcgggatctaccatcacaggaatgaatccgcgttcggtaagtttcatcgcttccgcagagctggttgccaggcgagcagtgacgccttcgaccgtcatttcgccatcgaacacggcctgggcaaacgccacggtacaacgaatcactgtcggtttttccacttccagcatgatcactttaaaacccgcatgatacagacgtagcgccacaccactggcgatatctcccgcaccgcgaatcaccaccagctggtgtccggaaggatgagaaggtttcatcatcagcccacccggcgcgttatttttcacctgtaatatttctgccagcacgctgatggcgatctcctgcggcgtttccgcacctatgttgtaaccaacgggcgcatgtaaacgggcaatatgttcttcagccacgcctttctcacgcaattgacgcaggaaaagctgaaccttgcgacgacttgccagcaaccccaaccatgcaatgggctgttcaatgagtttgtcgagggcttcacgatcctgattattcgtggcaatcaggacaaaattatcagggcgaatatccagtgcttccactgccgcaccaaagctctcagcatggagaagcgtggtacttggtgggaatagttcaggattgaggctttcgcgataaatatcagcaacggcaatatcaaatcctaatagcgccgcactctgggctatcgcccggttgacatgccccgcgccaatcaacaccagacgtggacgcataccatggacgctgataaatacactcattgcacctccacaatcactcccgacagcatccgcaccgttacgagccatacgtccatggaataatcgcggcttacgttcctgcaatgcctgaaggctctcttcaatcaccttccgctcaaccattccgccaccaattgtaccgacgatagaaccatcggcgcgcactaacatttgtgcagaatggcggggagtgctgcctcggctatcaacaatttgcgccatagcaaacggacaattttgctcttcgagttttgcagcctctgtgaaaatattcataccaacctcaatggatatcctttcagtaacccggaatacccgggccgttaattcacaaatctgcgcgcgattgcaggatgttcttgtatatcgcccagccagattgcctctacgtcgtgttgttgcagcggttgaaggagctcgctttgtgcaatcgcattctcacattgagaaaaacggttaatgaaccagactcgccgacaaccttgcggtacgtttttaaacgccccctgagggtggcgaaccagcgcaacgagatcgctcagttgcaaggttgcatcaggtgttaacccggtaatatcagcaaactggctccagcgatggacattttctgtgctcactttcgcgcccaaagtatgtcctcccatcacagcaatcacgcagcaactgcttttgggtatgcaaggttcgtgctcatcaggcgcttttaacggcattccacggctgccatctgcttcaatgagaattacgtcacactctggtcgttgcaccagtgcatcaatcgcttctggcgtaaatccctgcacttttccctggttcgctttccagctgtgaaaacaaaaactaatgggggatgtaagagacgcatgaggaagcatggcgggatcacgacagaaaaccacgggccagtgagacgttggcataaacatatgtgtcgtcgtcgtgattaacacacgcctgccgctagcctggagcagttctgccagccaaaaaagcaagctggttttccccccagcaccaacaacagaaatcacagtgggacgtttctgcgcacctaaatcaatgactaatgcgcttgggtcaactatacttttcacgagtctttatgacctctctgggataaattatccccaacttaatccatcaggaagtaacgcaattatcaggcgttattagcccctataaataatggaaccactatgagtgccatcgactgtataattaccgctgccggattaagtagtagaatggggcaatggaaaatgatgttaccctgggaacagggaacaattcttgatacaagtatcaaaaatgcgttgcagttttgtagccgaattattttagtcaccggctatcgtggtaatgaactgcacgaacgttatgcgaaccagagcaatatcactattattcacaacccagattatgcgcagggtttactaacatccgtcaaggccgcagtacccgcagtgcaaacagaacattgttttctcacccacggtgacatgccaaccctcaccatcgatatttttagaaaaatctggagcttacgaaatgatggcgcaatactgccactccataatggcatccccggccatccgattttagtgagtaaaccatgcctgatgcaggcaatccaacgacccaatgtcaccaatatgcgtcaggcactccttatgggagatcattattccgtcgaaatagaaaatgcagaaataattttagatattgatactccggacgactttattacagcgaaggaaaggtatactgaaatttaaaaaacgtagttaaacgattgcgttcaaatatttaatccttccggcactcattatcataatgataaggaatcactgattttgagaaaagagaaaaattgataaatgggctggcaataataattttcaggagtgattttaattctcatttagcacctgtgagttcattcacaaaaagcccttaagtttcgagccgcctcacatttttttatatttcccgccaaacctggcaagagtggtgcgattgttgctctatccccctaaaccaccggatttctcaacaccggtcactcaatgatatctgtataagctaaggagagggttatgggggatattatgcgtcccattccgtttgaggaacttttgacgcgcatatttgatgaataccaacaacaacgcagtatctttggtattcccgagcaacagttttacagtcctgtaaaaggtaaaactgttagcgtcttcggtgaaacctgtgccactcccgtcggccctgccgctggcccgcacacgcagctcgcgcaaaatattgtcacttcctggctgactggcggacgcttcatcgaactaaaaaccgtccaaattcttgaccgcctggagctggaaaagccctgtatcgatgccgaagacgagtgctttaacaccgaatggtctaccgagtttaccctgcttaaagcctgggatgaatacctcaaagcctggtttgccctgcaccttctcgaagcgatgttccagccttctgattccggtaaaagcttcatctttaatatgagcgtcggttacaacctcgaaggtattaagcaaccgccgatgcaacagttcatcgacaatatgatggacgcatctgaccatccgaaattcgctcaatatcgcgatacgctgaataaattactccaggatgacgcatttttagctcgccacggattgcaggaaaaacgcgaaagcttgcaagccttacccgctcgcatccccaccagtatggtgcatggcgtcaccctctccaccatgcacggctgtcctccgcatgaaatcgaagccatttgccgctacatgctggaagaaaaagggctcaacacctttgtgaaacttaacccgaccttactggggtacgcgcgtgttcgtgagatcctcgatgtctgcggtttcggttacataggcttaaaagaagagagttttgatcacgacctcaagctgacgcaagcactggaaatgctggaacgcctgatggcactggcaaaagaaaaaagtctcggctttggcgtaaaactgactaacactctcggcaccatcaacaataaaggcgcactgcctggtgaagagatgtatatgagtggccgtgcgctgttcccgctctccatcaatgttgcagcagttctctctcgcgcctttgacggcaaactgcccatttcttattccggtggtgccagtcagctgactatccgcgatatttttgatacaggtattcgccctattactatggcaaccgacctgctgaaacctggcggctatctgcgcttaagtgcctgcatgcgcgagctggaaggctccgacgcctggggacttgaccatgttgacgtcgaacgactgaacagactggcagcagatgcgttaaccatggaatacacccagaaacactggaagccagaagagcgtattgaagtggcagaagacctgccgctgaccgactgctacgttgccccctgtgttactgcctgcgctatcaagcaagatattccggaatacatccgtctgcttggcgaacaccgctatgccgacgcgctggaactcatctaccaacgcaacgctctgcccgccattaccggtcatatttgcgatcaccagtgccaatacaactgtacccgcctggattacgacagtgcgctgaatatccgcgaactgaaaaaagtcgcgctggaaaaaggttgggatgaatataagcaacgctggcacaaaccagccggttctggtagtcgccatccggttgccgtgattggtgcaggtccggcgggtctggcagcaggttacttccttgccagagcgggccatccggttacgctgtttgaacgcgaagccaatgcgggcggcgtggtgaaaaatatcattcctcagttccgtattcctgcagagttaattcagcacgatatcgattttgttgccgctcacggcgtgaaatttgagtatggctgcagtcccgatttaaccattgagcagttaaaaaatcagggcttccactatgttctgattgccaccggcactgataaaaatagcggtgtgaaactggcgggcgacaaccaaaatgtctggaaaagtctccccttcctgcgtgaatacaacaagggtacagcgctcaagctgggcaaacatgtggtcgttgtcggggcgggtaacaccgcaatggactgcgctcgtgcggcgttacgcgttccaggcgtagaaaaagcaacgatcgtttaccgtcgtagtctacaagagatgcccgcatggcgcgaagagtatgaagaagcgttgcacgacggcgtagagttccgtttcctgaataatccggaacgtttcgatgctgatggcaccttaaccttgcgcgttatgagccttggcgaaccggatgagaaaggtcgtcgtcgtccggttgaaaccaatgaaacagtaacactgcttgtagacagcctgatcaccgccattggtgaacagcaggatactgaagccctgaatgcgatgggcgtgccgctggacaaaaacggctggccagacgtcgaccataatggcgaaactcgtctgactgacgtctttatgatcggcgacgtacagcgcggaccatcctccattgtcgctgctgtcggaaccgcgcgtcgggcgaccgatgccatccttagtcgggaaaatatccgttcccaccagaacgataaatactggaacaacgtcaatccagcggaaatctatcaacgtaaaggcgatatctctatcacgctggtgaacagtgacgatcgtgacgcgtttgtcgcccaggaagccgctcgctgcctcgaatgtaactacgtttgcagcaagtgtgtggatgtctgcccgaaccgcgccaacgtctccattgcggtcccaggcttccagaaccgtttccagacgctgcacctcgacgcttactgtaacgaatgcggcaactgcgctcagttctgtccgtggaacggtaaaccgtacaaagacaaaatcaccgtcttcagcctggcgcaagactttgataacagcagcaacccaggcttccttgtggaagattgccgggtacgagtacgtctgaataaccaaagctgggtgttaaacatcgacagcaaaggtcagtttaacaacgtaccaccggagctgaacgatatgtgccgcatcatcagccatgtccaccagcatcatcattatctgctgggccgcgtggaggtgtaatcatgttgattctgaagaatgtcactgcggtacagctacacccggcaaaagtgcaggaaggcgttgatatcgccatcgaaaacgatgtgattgtcgctatcggcgatgccctgacgcaacgctaccccgacgccagcttcaaagagatgcatggccggattgtgatgccagggattgtctgcagccacaaccatttttacagcgggctttcccgcggaattatggcaaacatcgcccctttgcccggatttcatcagtacgctgaaaaatctctggtggcggctcgatcgcgcccttgatgaagagagcctctattacagcggactgatttgttccctggaagcgattaagagcggatgtacaagcgttatcgatcaccatgcctctccggcgtatatcggcgggagactctccacattgcgcgacgcatttttaaaagttggcctgcgcgcgatgacctgttttgaaactactgaccgtaacaacggcatcaaagagttgcaggaaggtgtagaagaaaacatccgtttcgcccgtttgattgatgaggcgaagaaagcgacaagcgagccgtatctggtggaagcacatatcggtgctcacgcgccgtttaccgtgccggatgccggtctggagatgctgcgtgaagccgtgaaagccacaggccgtggtttgcatattcacgctgcggaagacctttacgacgtttcctacagtcaccactggtacggcaaagacctgctggcacgactggcgcaattcgatctcatcgacagcaaaacgctggtcgctcatgggctgtacttgagcaaagatgacatcaccctactcaatcagcgcgatgcgttcctggtgcataacgcccgtagtaacatgaacaaccatgtcggctacaaccatcaccttagcgacatccgcaatctggcgttgggaacggacggcattggtagcgacatgtttgaagagatgaaatttgccttctttaaacatcgcgatgcgggtggtccgctgtggcctgacagttttgccaaagccctgactaacggtaacgaactgatgagccgcaactttggcgcgaaatttgggcttctggaagccggttacaaagctgatttaaccatttgcgattacaacagcccgacgccgctgctggcagacaatatcgccgggcatatcgctttcggtatgggcagtggcagcgttcacagcgtgatggtcaatggtgtgatggtctatgaagaccgtcagtttaacttcgattgcgattccatttatgcacaagccagaaaagccgctgccagtatgtggcgtcggatggatgcgctggcataaatgacagatgccctcttcccgcagggaagagggttaaataaggaaagaagatgattgaacaatttttcaggcccgactctgtcgaacaggcgctggaactgaagcgccgctaccaggatgaagccgtctggttcgccgggggcagcaaactcaatgctacaccaacccgtaccgataaaaagattgccatttccttacaggatctggaactggactgggttgactgggataacggtgcactgcggattggcgcaatgtctcgcttgcagccactgcgtgatgcgcgatttattcctgcagcgctgcgtgaagccctcggttttgtttacagtcgccatgttcgtaatcagagcaccattggtggtgaaatcgccgcccgccaggaagagagcgtgctgcttcccgtcctgttggcactggatgctgaactggtttttggcaacggcgaaacgctgagtatcgaggactacctggcctgcccatgcgatcgcctgctaaccgaaattatcattaaagatccgtatcgcacctgtgcgacccgcaaaattagccgttctcaggcaggtttaaccgtcgtgacggcagccgttgcaatgacagaccacgacggtatgcgaattgcgctggatggcgtcgccagtaaagcactgcgtctgcatgatgtcgaaaaacaaaatctggaaggcaatgcacttgaacaggctgtcgccaacgccattttcccgcaggaagatttgcggggcagcgtggcctataaacgctatatcacgggagttctggtagccgacctgtatgccgactgccaacaggctggggaggaagccgtatgatcatccactttactttaaatggcgcgcctcaggagctaaccgttaatccaggcgaaaacgtgcaaaagctgttgtttaacatgggaatgcactctgtacgcaacagtgatgatggtttcgggtttgccggttctgacgcaataatctttaacggtaatatcgttaacgcgtccttgcttattgccgcacagttagagaaggcagatattcgtaccgcagaatctctgggcaaatggaacgagttaagtctggttcaacaggcaatggttgatgttggcgtggtgcagtctggttataacgatccagctgcagctctgattatcaccgatcttctcgatcgcatcgccgcacctacccgcgaagagatcgacgacgcgctttctggtttgttcagccgcgatgctggctggcagcaatactatcaggtcattgaactggcggttgcacgtaaaaataatccgcaggccaccattgatatcgctccgactttccgtgacgacctagaagtcattggtaagcattatcctaaaactgatgccgcgaaaatggtgcaggcgaaaccctgctatgttgaagaccgcgtaacggctgacgcctgcgtcattaaaatgttacgtagcccacacgctcacgcactgattactcatctggatgtcagcaaagctgaagccttaccgggcgtcgttcacgttattactcacctgaattgcccggatatctactataccccgggtggtcagagcgcaccggaaccgagtccgcttgaccgccgtatgttcggcaagaaaatgcgtcacgtcggcgatcgtgttgctgcggtcgtcgcagaaagtgaagaaattgcgctcgaagcactgaagctcatcgacgttgaatatgaagtgcttaagccggtaatgagcatcgacgaagcaatggcggaagatgcgcctgtcgtgcacgatgaaccggtggtgtatgttgctggtgcgccagatactctggaagacgataacagccatgcagcccagcgcggcgagcatatgatcatcaacttcccgatcggttctcgccctcgcaaaaatatcgccgccagtattcatggtcatattggcgatatggacaaaggctttgccgatgccgatgtgatcattgagcgaacctataacagtacgcaagcgcagcagtgcccgactgaaacacatatctgctttactcgtatggacggcgatcgtctggttatccacgcctccacccaggtaccatggcacttacgccgccaggtcgcgcgcctcgtgggcatgaaacagcataaagttcatgtcattaaagagcgagttggcggcggttttggttccaaacaggacatcctgctggaagaagtgtgcgcctgggcaacctgcgtgaccgggcgtccggtactgttccgctacacccgtgaagaagagtttattgctaacacctctcgtcacgtcgcgaaagtcaccgtcaaactgggagcgaaaaaagatggtcgcctgacggcagtgaagatggatttccgcgccaacactggcccttacggcaaccacagtctcaccgtaccgtgtaacggaccggcgctgagcctgccgttatatccgtgcgataacgtcgatttccaggtcaccacctactacagcaacatttgcccaaatggtgcttatcagggttatggcgcaccgaaaggtaacttcgctatcaccatggcattagcggaactggctgaacagttacagatcgaccaactggaaattatcgaacgtaaccgggtacacgaagggcaagagctgaaaattctcggtgcaatcggtgaaggtaaagcgccgacctccgttccttccgccgccagctgtgcactggaagagatcctgcgtcagggtcgcgagatgatccaatggagcagtccgaaaccgcaaaatggtgactggcacatcggtcgcggcgtcgccattatcatgcagaaaagcggtatcccggatatcgatcaggctaactgcatgatcaaactggaaagcgacggcacctttatcgttcattctggcggtgcggatattggtactggtctggatactgtagtgacgaaactggcagcagaagtgctgcactgcccaccgcaggacgtgcatgttatctccggtgataccgatcatgcgttgtttgataaaggcgcatatgccagctccggtacttgcttcagcggtaacgcggcgcgtttggcagcggaaaatctacgggagaaaattctgttccacggcgcgcaaatgttgggtgagccagtggcagatgttcaactggcaacgccgggcgtcgtgcgcggcaagaaaggcgaagttagtttcggggatattgcccataaaggcgaaaccggcaccggctttggtagtctggtgggaactggcagttatatcacgcctgatttcgccttcccgtatggcgcaaacttcgctgaagttgccgtcaacacgcgtacgggtgaaatccgcctggataaattctacgccttgctggactgcggtacaccggtcaatccagagttagcgttgggacaaatctacggtgccaccctgcgtgctatcggccacagtatgagcgaagagatcatttatgacgccgaaggtcacccgttaacgcgtgatttacgcagttacggcgcaccgaaaattggtgacattccgcgtgatttccgcgctgtgctggtgccgagcgacgataaagtcggcccgttcggggcgaaaagcatcagcgaaatcggtgtaaatggcgcagctccggcgattgctaccgcaattcacgatgcatgcggcatctggttacgcgaatggcatttcacaccggagaaaatactcactgcgctggaaaaaatataaataataaatggccgcttcggcggcctgtttctctgtttgaacgatgactaaatagtgactgcgaaaatgagataagccgttctcaaggcgtcctgcgccccaaattcgtgggaatttattttactaattcagatgatcaaatttactttaaaaggagtgaagggatgtctgatataaaccatgcaggttctgaccttatatttgaactggaggatcgccctccctttcatcaggctctcgttggtgccattacccatctgttggcaattttcgttccgatggtaacccccgcgttaatcgtgggtgcggccttacagctttccgctgaaacaactgcctatcttgtttctatggcgatgatcgcctctggtattggtacctggttacaagtaaaccgctacggcatcgtcggttctggcctactcagtattcagagtgtcaattttagttttgttacggtcatgattgcgctgggcagcagcatgaaaagcgacggttttcacgaagagttaatcatgagcagccttctcggcgtctccttcgttggcgcatttctggttgtcggatctagttttatcttgccctatttacgtcgggttattacgcctaccgtcagcggtattgtggtactgatgatcggcttaagcctgattaaagtcggcattatcgattttggtggaggatttgcagccaaaagcagcggtacgttcggcaattacgaacatctcggcgttggtttattggttttaattgtggtgatcggctttaactgctgtcgcagtccgttgctacgcatgggagggatcgccattgggctatgtgtcggctatatcgcaagcttatgcctgggcatggtggatttcagcagtatgcgcaatttgccgttaatcaccatcccgcatccgttcaaatacggctttagttttagcttccatcagttcctggtggttggcacgatttatctgcttagcgtgctggaagcagtcggcgatatcaccgccacggcaatggtttcccgccgccccattcagggggaagagtatcagtcccggctgaaaggcggcgtgctggcagatggtctggtttctgttatcgcctccgctgtcggtagtttaccattaaccacgtttgcgcaaaataatggggttattcagatgactggcgtcgctagtcgttatgtcgggcgaaccatcgcggtaatgctggttatcctcggcttatttccgatgattggcggcttcttcacgaccattcccagcgcagttctgggaggcgcaatgacgttgatgttttccatgattgccatcgcagggattcgcatcatcatcaccaacggtttaaagcgccgtgaaacacttattgtcgccacttctttaggtttagggcttggcgtctcctacgatcccgaaatttttaaaatattgccagcctctatttatgtattagttgaaaaccctatttgtgctggcgggttaactgcgattttattaaatattatcctccctggtggctaccgacaggaaaacgttctgcctggtattaccagtgcggaagagatggattaacagtaaaggagtcaatgatgagtggagaacacacgttaaaagcggtacgaggcagttttattgatgtcacccgtacgatcgataacccggaagagattgcctctgcgctgcggtttattgaggatggtttattactcattaaacagggaaaagtggaatggtttggcgaatgggaaaacggaaagcatcaaattcctgacaccattcgcgtgcgcgactatcgcggcaaactgatagtaccgggctttgtcgatacacatatccattatccgcaaagtgaaatggtgggggcctatggtgagcaattgctggagtggttgaataaacacaccttccctactgaacgtcgttatgaggatttagagtacgcccgcgaaatgagcgcgttcttcatcaagcagcttttacgtaacggaaccaccacggcgctggtgtttggcactgttcatccgcaatctgttgatgcgctgtttgaagccgccagtcatatcaatatgcgtatgattgccggtaaggtgatgatggaccgcaacgcaccggattatctgctcgacactgccgaaagcagctatcaccaaagcaaagaactgatcgaacgctggcacaaaaatggtcgtctgctatatgcgattacgccacgcttcgccccgaccagttctcctgaacagatggcgatggcgcaacgcctgaaagaagaatatccggatacgtgggtacatacccatctctgtgaaaacaaagatgaaattgcctgggtgaaaagcctttatcctgaccatgatggttatctggatgtttaccatcagtacggcctgaccggtaaaaactgtgtctttgctcactgcgtccatctcgaagaaaaagagtgggatcgtctcagcgaaaccaaatccagcattgctttctgtccgacctccaacctttacctcggcagcggcttattcaacttgaaaaaagcatggcagaagaaagttaaagtgggcatgggaacggatatcggtgccggaaccactttcaacatgctgcaaacgctgaacgaagcctacaaagtattgcaattacaaggctatcgcctcagcgcatatgaagcgttttacctggccacgctcggcggagcgaaatctctgggccttgacgatttgattggcaactttttacctggcaaagaggctgatttcgtggtgatggaacccaccgccactccgctacagcagctgcgctatgacaactctgtttctttagtcgacaaattgttcgtgatgatgacgttgggcgatgaccgtagcatctaccgcacctacgttgatggtcgtctggtgtacgaacgcaactaataataaaactttaacatcctcgtgaggacatcattatgtctggagacatcctacaaacaccggacgcaccaaagccacagggcgcgctggataattattttaaaattaccgctcgtggcagtaccgttcgtcaggaagtactggctggcttaacgacctttctggccatggtttattccgttatcgtcgttccgggaatgctgggcaaagcaggttttcctcccgcagctgtgtttgttgccacctgtctggtcgcgggcttcggcagcttgctgatgggattatgggctaatttgccaatggcgattggttgcgcgatttccttgacggcgtttaccgcattcagtctggtactcgggcaacaaattagcgttcctgtcgcactgggcgcggtatttctgatgggcgtcatcttcaccgccatttccgtaaccggtgtgcgtacctggatcttacgtaatttgccgatgggtatcgctcacggtacaggtatcggtatcgggctgtttctgctgctgattgctgctaacggtgtgggtatggttatcaaaaacccgattgaaggcttgccagtggcgctcggtgcgtttacctccttcccggtgatgatgagcttgctggggctggcggtcatcttcggcctggagaagtgtcgcgtacccggcgggatcttgttggtgattattgcaattagcatcatcggcttaatctttgacccagcggtgaaataccacggtctggtggcgatgccaagcctgactggcgaagatggtaagtctctgattttcagcctcgatattatgggtgcactccagccaactgtacttccgagtgtactggcattggtgatgaccgcagtgttcgacgctactggcaccatccgtgccgtcgccggtcaggcgaatttgttggataaagacaaccagatcatcaacggcggcaaagccctgaccagtgacagtgtaagtagtatattctccggcctggtgggcgcagcgcccgcagcggtttatatcgaaagtgcggcaggaaccgccgccgggggtaaaacaggtttaaccgcaaccgtagtgggggcgttattcctgttaattctgtttttaagtccgctgagttttttgatccctggttacgccactgcacccgctctgatgtacgtaggtttgctgatgttaagtaacgtcagcaagctggatttcaatgattttattgacgctatggctggcctggtgtgtgccgtgttcatcgttctgacttgtaatatcgttaccggtattatgctgggctttgtgacactggtcgtaggccgcgtctttgcacgcgaatggcaaaagctgaatattggtacggtgatcattactgccgcactggtcgcattttacgcgggtggttgggcaatctaatagattctccgcgcctttcagcgcggagatttctttcagagaggattctcaccgctggcaacaatacgctgctggcggactcgcctgagttctctttcagtaagcaactgcagcgcctgtgttgggcaagattcaacgcaggctggcccctcttcccgctgttcacagagatcgcatttcacaatttgttgtcgggtatcccccggcaagctctgaatggtgatcattccaaacgggcacgcactgacgcaactctgacagccaatacaacgggcagaattggtctgcaccacctgctcgcccatcgtcagcgcccccacggggcaagcgccaacacaaggggcgttttcacactgatggcacatcaccggcgcactgatgctgtccagtcgctgtaccttcagccggggtaaaaagacatcggcattcaactcctgttcactagggtgagcgaccacacaggctacttcacaagtacggcagccaatacagtcagccggattaacgataattaagcttttcatcagcttgccttcgtatcaaacagagttaacatatcgcgcgccgcctgccttcctgcggccattgcagtgacaaccagatccgcgccatgaactgcatcaccaccagcaaagacttttttcagatgcgtctgggtaggtaaatacccgacgtcaccggtttgaatcaggccccatttatcgagtttaattccgctgccctgcaaccacggcatggcatgcgcctggaaaccaaaggccataatcagaacatcggcgggcaattcaaactcactacccgctaccggacgaggacgacggcgaccatccggccccggctcacccatggcggtacgaatcaggcccaccgcagttaaacgcccatcttcgtcacaagcgatatattgcggttgaacattgaactgaaactcgacaccttcctcgcgcgcattaaccacctctttgcggctgcccggcatactgacttcatcacgacgatacgcgcaggtcacgctggcggcattgaggcggatggaagtccgcaaacaatccattgtcgtatcgccaccgcccaataccacgactcgcttaccttccacgtccgtcagcggatactcttcagactccggcaatcccatgagctggcgggtatgggcagtcaggaacggtagagcctgaatgacaccgggcgcatcttcatgcggcagatctgctcgcatcatcccgtaagtccccacgccgatgaaaactgcatcatattcagaagttaaatcgctaaaggtaatatcgcggccaatttcacagttaagatgaaagtcgattcccattgcggtgaatatctctcgccgctggcttaataccgttttatcgagtttgaaaggaggaatgccaaaagtcagcataccgccaatttctggatggcgatcaaagacatcgacctgaactcctgcgcgcgccagaatatcagcacaccctaaccctgcaggcccagcgccaatcaccgccactttttcgctacggggaacaactttgctgacatcgggacgccaacccatcgccagcgcggtatcggtgatgtagcgttccagattaccgatagagactgcgccgctgtgatctttcaaagtacatgcgccttcacaaagacggtcctgtggacataccctgccgcaaatttctggtaaggaactggtctggtggcaaagttctgccgcttcaataatctttccttcctgtaccagacggatgtaatccggaatagcgttatgcagcgggcaatgccagttgcagttagctttttcggcacaataaacacagcggtcactctcataagtcgcttgttgtggatccagcccgcaatatatttcgccaaagtgggttttccgttcactcgcactaattttatctgcgcctttacggctgttaacggggagcaacgctgcactgcgagatggctgagcgtcactactcgcttttcctgctgccgttttgcgctggcgggccacctttatctgctgcaaccctttatcgtccatcagtcgtaacgcctgtgttgggcaaacttcaatacaggcttgcgtgccggaactgcgctggttacaaaggtcgcatttctgcgcaatcgtatcgaccatctcaacgacgccaaaggggcaagcgattgcgcatcttttacaaccaatacatttttgctcgtccagttgtacgctatcggactggaaagtcagagcattaaccggacaagccgtaacgcaaggggcattgttgcagtgatggcaggccaccggattcgcagcctggcctttccctacaacgtggatacgcggtcgaaagtcactgtgactcagcggccagttttcttgattgtgtgccaccgcacaggcaatttcacaagcatgacagcctatacattccgcagcttcagcagcaataaacttattcatttgcatccctttcatttaatgagttatgtcttctcaaatttcgcgatgcaataaacgggcatatattaggtagcatgaccgttttaattataattttgcgactgagttcaaattattgcccctcaatctatgccgctttcattatttcaacattgccgatcaaaagagcgctatccagataaaaacgattaaatgcgagagtgcgacatgccagaatgattaatgaaatatcaatatgagaaaattacagataattccattgtcaggttctcttctcattttcgtggtttaaccacgattatgtgattgcctccgcaattcctgtctctaactccccttcctcgcaaaaactggcactccacgagcatgtgtttagacagtttcattaacgtaaacggttgctttttactctggcgggcgaaaggagaaacactgatgagcgccatagattcccaacttcccagttcttctgggcaagaccgcccaactgatgaggttgaccgcatattaagtccaggaaagctgatcatactcggtctgcaacacgtccttgtcatgtacgcaggtgcagtcgctgttcctcttatgattggtgaccgactgggcctcagtaaagaagctattgcgatgctcattagcagcgatctcttttgctgcgggatcgtcacattattgcaatgtatcggtatcggccgctttatggggatccgcctgccggtgattatgagcgtgacctttgctgctgtaacaccaatgatagccattgggatgaacccggatatcggcctgctggggatatttggtgccactatcgccgcgggttttatcaccacattattagcgccacttatcggtcgcttgatgcctttattcccgccactggttaccggtgtggttattacttctatcgggcttagcatcattcaggtgggtattgactgggccgccggaggtaaagggaatccgcaatatggtaatcccgtttatttaggtatctcctttgccgtcttaatttttatcttgctcattactcgctatgcgaaaggatttatgtccaacgtcgccgtattactggggattgtatttggctttttacttagctggatgatgaatgaagtcaatttatccgggctacatgatgctagttggtttgcgattgttacgccgatgagctttggtatgccgattttcgatcccgtttccattctgaccatgactgccgtgttaatcatcgtgtttatcgagagtatggggatgttcctggcactgggtgaaatagtcggtcgtaaactctctagccacgatattattcgcgggctgcgtgtcgatggcgtagggacaatgataggcggcacgtttaacagcttcccccacacgagtttttctcaaaacgttggcctggttagcgtgacgcgcgttcatagccgctgggtgtgtatttctagcggaattatattaatcctgtttggcatggtgccaaaaatggcggtgctggtagcctccattccgcaatttgtgctgggcggcgctggtctagtgatgttcggcatggtactggcgacagggattcgaattctgagccgctgtaactacaccaccaaccgttacaacctctatattgtggcgatcagtctcggcgttggcatgactccgacgctctctcacgatttcttttctaagttaccggccgtactgcaaccgctgctacatagcggcattatgctcgcaacccttagcgccgttgtgctgaacgtcttctttaatggctatcagcatcatgctgacctggtgaaggaatccgtctctgataaagatttaaaagtcaggacagtacgtatgtggcttctgatgcgcaagctgaagaaaaatgagcatggagaataatatgaattttttaatgcgcgctatattcagtctgttgttgctttttactctctctattcctgtcatttctgactgtgttgcaatggccattgaaagtcgcttcaaatatatgatgctacttttttaaatggtttttacctgtcggcatccgctcaaaacgggcggttgtcgataaacgctcacttggttaatcatttcactcttcaattatctataatgatgagtgatcagaattacatgtgagaaattatgcaaacggaacacgtcattttattgaatgcacagggagttcccacgggtacgctggaaaagtatgccgcacacacggcagacacccgcttacatctcgcgttctccagttggctgtttaatgccaaaggacaattattagttacccgccgcgcactgagcaaaaaagcatggcctggcgtgtggactaacagcgtttgtgggcacccacaactgggagaaagcaacgaagacgcagtgatccgccgttgccgttatgagcttggcgtggaaattacgcctcctgaatctatctatcctgactttcgctaccgcgccaccgatccgagtggcattgtggaaaatgaagtgtgtccggtatttgccgcacgcaccactagtgcgttacagatcaatgatgatgaagtgatggattatcaatggtgtgatttagcagatgtattacacggtattgatgccacgccgtgggcgttcagtccgtggatggtgatgcaggcgacaaatcgcgaagccagaaaacgattatctgcatttacccagcttaaataaaaaaaccccgacatttgccggggttgtgagcataacgtaatgcttattttaccggacgcatcgccgggaacagaataacgtcgcggatggtatggctgttggtgaacagcattaccatacggtcgataccaattcccagacctgctgtcggcggtaagccatgttccagtgcggtgacgtaatcttcatcgtagaacatcgcttcgtcgtcacctgcgtctttcgcggcaacctgatccaggaagcgttgcgcctgatcttccgcgtcattcagctcgctaaagccgttaccgatttcacgaccaccaatgaagaactcaaagcggtctgtgatttccgggttaacgtcgttacgacgcgccagcggagaaacttctgccggatattcagtaatgaaggtcggctgaatcagatgtgcttctgccacttcttcgaagatctcggtaacgatacggcccagaccccagctcttctcaacgtggatgccgatagattcagcaattgctttcgcagagtcgaagttgtccagatccgccatgtcggtttccgggcgatatttcttgatcgcttcacgcatggtcagtttttcgaacggtttaccgaagtccagcgtcacgtcgccgtaggtcacttccgtcttaccgagaatatcctgtgccagagtacggaacaggctttcggtcagctcgatcagatctttgtaatctgcgtaagccatgtagagttccatcatggtgaactctgggttatgacgtacggaaataccttcgttacggaagttacggttgatttcgaatacacgctcgaagccaccaaccaccagacgcttgaggtacagttccggcgcgatacgcaggtacatgtcgagatccagcgcgttatggtgggtgataaacggacgcgcagcggcaccgccagggatcacctgcatcatcggcgtttcaacttccataaagccgcggttcaccatgaactggcgaataccagagaggatctggctgcgcactttaaaggtgttgcgggattcatcgttggagatgagatcgagataacgctgacgatagcgcgcttcctgatcctgcaagccgtggaatttatccggcagcggacgcagtgctttggtcagcagacgcaactcggtgcagtggatagacagttcgccggttttggttttgaacagcttacctttcgcgccgaggatgtcgccgaggtcccattttttgaactgctcgttataaacgccttccgggagatcgtcacgggcaacgtacagctgaatgcgaccgccaacgtcctgcagggtaacgaaagacgctttacccataatacgacgggtcatcatgcggccagcaacggcgacttcgatgttcagcgcttccagttcttcgttctctttgccgtcgaattctgcgtgcaattggtcagaggtatgatcgcgacggaaatcgttcgggaaggcaatcccctgctcgcgcaggttcgccagcttctcacgacgcgttttcagttcattgttaagatcgactaccgcgtcagcgccctgtgcgtgttgttcagacatgttggttcctcataaccctgctttcaaacttgcttcgataaattgatccaggctgccgtccagcacggcctgcgtgttgcgggtttctaccccggtgcgcagatctttaatgcgggagtcatcaaggacataagaacgaatctggctgccccagccgatgtcggatttgttatcttccatcgcctgtttctcggcatttttcttctgcatctccagttcataaagcttcgctttcatctgcttcatggcctgatctttgttcttgtgctgggaacggtcgttctggcactgggtcacgatcccggtcgggatgtgggtaatacgcaccgcagattcggtacggttaacgtgctgaccgcccgcgccggacgtgcgataaacgtcaatgcgcagatccgccgggttgatttcgatatcaatatcatcatcaacttccggataaacaaacgcggagctgaagctcgtgtggcgacgaccgccggagtcaaacgggcttttacgcaccaggcggtgaacgccggtttctgtacgcagccagccgtaagcgtaatcgccggagattttgatcgtcacggatttaatacccgccacttcaccttcgctctcttcgatgatttcagttttgaaaccacggctttctgcccagcgcagatacatacgctcaagcatgctcgcccagtcctgtgcttccgtaccgccagaccccgcctgaatatcgaggtagcagtcggcgctgtcatattcgccagagaacatacggcggaactcaagctgcgccagtttttcttccagggcgtcgagttcagcaacggcttcgttaaaggtttcttcgtcgtcagcttctacagccagttccagcagaccagaaacatcttccagcccctgtttcatttggtcgagggtgtcgacaacggcttcgagggaggaacgctctttacccagcgcctgtgcgcgttcgggttcgttccagacatccggctgttccagctcggcgtttacttcttccagacgctctttcttggcgtcgtagtcaaagataccccctaagaacgtcggagcgttccgtgaggtcctgaatgcgattatttaccggattaatttcaaacatggtctgatttcttttattgagctagtcaaaatgcggtgataagagcgggattgtacccaatccacgctcttttttatagagaagatgacgttaaattggccagatattgtcgatgataatttgcaggctgcggttgccgcgaaactcgttgatatcgagcttataagccagttgcacttcgcgcacgccgttatccggccagagggcggtatcgacattaaaagcaataccatccagcagtggaccgccgccgaccggttcgaccatcaccttcaaatgacgttcgcccaccagccgctgttgcagcagacggaaatgaccgtcaaacagcggctccgggaacatctgcccccacgggccagcatcgcgcagcagctgcgccacttccatggtcatttcggccgggcttaacggaccgtcacttaccacttcgccttgcaataggctagggtccagccactcagtaaccagttcgccaaaccgttgttgaaagagtttgaatttatcctcttccaggctcaaacccgccgccatcgcatgaccgccaaacttcagcatcatgccagggtagagtgtgtctaatcgctccagcgcatcacgcatatgcagcccctgaatggagcgaccggaacctttcagcgtaccgtcacctgctggcgcaaacgcgataaccggacggtgaaaacgctctttgatgcggctagccagaataccgacaacgccctgatgccattcggggtgatacattgccagcccgccgggtagcgtgtcacggctgcgctccagtttctcgcacagggtcagggcttcaatttgcattccttgttcgatctcttttcgcgtctggtttagcgcatcgagttcatttgccagcacgcgcgcttcgccgatgttgtcgcacaacaacagcgccacaccgacggacatatcgtccagtcgtccggcagcattgagacgtggccccagcgcaaaacctaaatcgctggcggcgagtttttgtgcatcacggtttgccacttcaagcagcgctttaatccccggacggcactttccggctcggatgcgactcatcccctgccaggtcagaatgcgattattagcgtccagcggcacgacgtccgccactgtccccagcgcgaccagatccagcagttctgccaggttaggaattgcgatgttacgctcatcaaaccagccctgatcgcgcaaaaaggtgcgcagcgccagcatcagataaaacgccacacccacgcctgccagacttttgctcgggaaattacagtcgcgcaagttagggttaatgatcgcttccgctgcgggtaatgtgtcgcctggcaaatggtgatcggtaacaataaccgggatgcccaagctgcgagcgtgctcaacccccgcatgggaggaaataccgttatccaccgtgacaattaactgcgcgccacgggcatgggcctgatcgaccacttccgggcttaagccgtaaccgtcttcgaaacggtttggtaccaggtagtcgatattgctgcaaccaaggctgcgcatcgccagcacgcttagagccgtgctggtcgcgccgtcggcgtcgaaatcaccgaccacaataatccgcgttccttcgcgaaaagcgttgtaaaggatctcaacggccttttcgacgccgctcagttgctgccagggcagcatacctttaacactgcgttccagttcttgcgcactgcgtactccccggctggcgtataaacggcgcagcaagggaggcaattcagcgggcaagtctgccgtttcatcgacttcacggcgacgaagttgtatctgttgtttcacgcgaattatttaccgctggtcattttttggtgttcgtcgaggaattctttcatctctttcggcggctggtaacccggaacaagtgtgccattgctcagcacaactgccggagtaccgctaacgccaagctggacgccaagtgcgtaatggtcggcaatatccacgtcgcaactggctggtgcgacgcttttacctgccatcacatcatcaaacgctttgtttttatctttcgcacaccagatagctttcatttctttctctgcatcgctgtccagcccctggcgcgggaaagcaagataacgcacggtgatccccagcgcgttgtagtctgccatttgctcatgcagtttgtggcagtaaccacaggtaatatcagtaaacacggtgatgacgtgtttttcctgcggcgctttataaacgatcatctctttttcaagcgcattcaactgctttaacagcatcttattggtgacattgaccggagccgtgccactaacgtcatacattggcccctgaatgatatgtttaccatcatcggtgatgtacaacacgccgctgttagtcagaactgtcttcatgccagctacaggcgcgggctgaatatcgctgcttttgatgcccattttggctaacgtttgttgaattgccgcgtcatcagcctgagcaaagccactaaacgccgctaacaaagtaaacaacataaaacctttcttcataaatcttcccgttcttttcagacatcacgcccgcgggtgatgctgttgatgaagttgccgcagacgctcggtagcgacatgcgtataaatttgcgtggtggagagatcgctgtggcccagtagcatctgcaccacgcgtaaatccgcaccatgatttaataaatgagtggcaaaagcgtgacgcaacacatgcggactcagcttttcgctgtcgatacccgccagcacagcataatgtttaatacggtgccagaaggtctgtcgcgtcatctgctgcgcacgctggctgggaaacaacacgtcaatactcacaccattcagcagccacggacgcccatgttccagataggtttccagccagtaaaccgcctcttcacctaacggcaccagacgctctttgttgcctttaccaatgacccgtaccacgccctgacgcaggctgatatcactcattgtcagtccgaccagttcagagacacgcagcccggtagcatacaacacttcaagcatggctttatcgcgtagctccagtggctgatcgattaatggtgcctgtaataaacgttcgacctgcgcttcgcttaaatcttttggcaaacgctggggcaatttcggactagcgagatgcgcactgggatcgtcttcacgaaacttttcgcgataaagatactggaacaatcggcgcactgcactcagcaaacgcgcactgctggtggctttatacccgccctccagccgttctgccagtaatgcctgcaaatcgtcactttgcgccgtcgccagcgtcaacccgcggtgatgcaaccactccaccatcatactcagatcgcgacggtaagcgttcaacgtattttcagccagatttttttccagccacagagcatcaagaaactgctcgatgcgtgccagatcctgtttcacttgcgccccttatggtcactcatttgatccattatgccttattgtgccgtgactaaagcgattctgatacactagccgcaaaagccacagcagaatcgagaagcttacgttatgaatatgggtcttttttacggttccagcacctgttacaccgaaatggcggcagaaaaaatccgcgatattatcggcccagaactggtgaccttacataacctcaaggacgactccccgaaattaatggagcagtacgatgtgctcattctgggtatcccgacctgggattttggtgaaatccaggaagactgggaagccgtctgggatcagctcgacgacctgaaccttgaaggtaaaattgttgcgctgtatgggcttggcgatcaactgggatacggcgagtggttcctcgatgcgctcggtatgctgcatgacaaactcagcaccaaaggcgtgaagttcgtcggctactggccaacggaaggatatgaatttaccagcccgaaaccggtgattgctgacgggcaactgttcgtgggtctggcgctggatgaaactaaccagtatgaccttagcgacgagcgtattcagagctggtgcgagcaaatcctcaacgaaatggcagagcattacgcctgatctcactgacggcttagcgcatatgctttgccgtcatctttatctttgcgtctcttgttgcaacaaaatccgccgtaaatcccgccattcagcttcgtccatgctgtcggctgccagccataaatgttgccgtttaccgccatcagaacgtaaacgcagcatcatgccgctcttaatcatccacggtgctttgacgatgctccactcctgcccttgccaacgcaaacgcccgtccatcaacaagcgaatttccccctggcgagcattaatacgccgctggctgcgaacgcaatcaaacaccaccaggctaagtaacaccatccataacggggtgtaactgagtggccagggcatgagtaaaataacagcggcaaccagcccatgaatcagcaaggaaagccactgtgcgcgccaggagacgcgcaaatcagattgccacaggaccacgttcccggttccgtgtctggatgagtcggaccatcatttccagttctgcatcggccggtttaccgtgattcatcagccagttaaacaggtccggatcgtcacattccagcagacgaataaagatgcgtttttcgtcatcgcttaagctgtcgtactcatgttcgaaaaacggcatgatactaatatcgagttcgcgcataccacggcggcatgcccaatgaatgcgggctttgttgttaatgtccatcttcttcctgtctcacgaaaatccagtacccggctattgtaacgtgtttttcgccttcttttacgggaatatcagtaaacaccatcgcgatcgcgaaattaattcacaacaattcaatggcttcatttttttggaagtcgcctcgcagaaggcacagatcgcgtagtgaaagcacttgcattgcctcatagctcttttaccattagtcattaatacgccgttaagcaactcaggactctattatggcttttacaccttttcctccccgtcagcctacggcttctgcccgtttaccgctgacgctgatgacgcttgatgactgggcgcttgccaccattactggcgcggacagcgaaaaatatatgcagggtcaggtgacagcagatgtcagccagatggcagaagatcagcacctgctcgccgcccattgcgacgccaaaggtaaaatgtggagcaatttacgtctgttccgcgacggcgatggctttgcatggattgaacggcgcagcgtgcgtgaaccgcagctgactgaactgaaaaaatatgcggtattctctaaagtgaccatcgcgccagacgacgagcgtgtgctgcttggtgttgccggttttcaggcgcgcgccgcgctggcaaatctctttagcgaactgcctagcaaagaaaaacaggtagtcaaagaaggcgcgaccactttgctatggtttgaacacccggcagaacgtttcctgatcgtaaccgatgaagctactgctaatatgctgaccgataaactgcgcggtgaagcggaactgaacaatagccaacagtggctggcattaaacattgaagcgggtttcccggtgattgatgccgccaacagcgggcagtttatcccacaggcgaccaatctccaggcgctgggcggtatcagctttaagaaaggctgttataccggacaagagatggtggcgcgagcaaaattccgtggtgccaataaacgtgcgctctggttgctggcaggtagcgccagccgactgccggaagctggtgaagacttagagctgaaaatgggcgagaactggcgtcgtaccggtacggtactggctgcggtaaaactggaagatggtcaggtcgtggtacaggtcgtcatgaataacgatatggaaccggatagcatcttccgcgtacgcgacgatgcgaatacattgcatatcgagccgctgccgtatagcctcgaagagtaaatctctttatcgcatcaggcatttatcgcctgatgcgacgctggcgcgtcttatcatgtctgggatttgatgcctttatcacaacagggacgaggcccgtagatcggataaggcgttcacgccgaatccggcagttgtgctccgatgcctgatgcgacgctggcgcgtcttatcaggcctacaaaggcatacccattacgcctgcccaatatacaaatagatcgccagaaagtggcacacactaccgccgagcacgaagccgtgccagatggcatggttgtatggaatgcgtttgcagacgtagaaaatcaccccgaggctataaaccacgccgcctaccgccagtaaggtaacgctgcccgccgcgagcttaactgccatttcataaattaccaccaggctcagccagcccatcgccagataggtcaccagagataaaattttgaatcggtgcgcgatggtcagtttaaacagaatacccagcaatgccaggctccagataacaatcatcaacccgcgcgctaacggagaatccagccccaccagcaaaaacggcgtgtaggttccggcaatcaacaggtaaatagcgcaatggtcaaatttcttcagccacatttttgcccgttgatgaggaatggcgtgatagagcgtgctagcgaggaacagcaggatcatactgccgccatagaggctgtagctggttatcgctgtggcgctggcattaagatccaccgcctgaaccagtagcaacaccagcccaacgataccaaacaccaacccaatgccgtgactgacgctgttggctatttcctctgccagactatatccctgcttaatgaggggcttctgaaccataacttactccggagaaacgtacacgcacatgtatacctctccagcgtaactgagaatagttccagtgaacacctgttagctaaaataaattctgatttgagactaatctcctaaaaatcatgaaattaaatgcgaaatttcaactaacaggcgtgagttcaatttaaagacatttaaattcaatcacataaaattgtgtctgaccgggatagatgtcagcaatgacttttttcagttcagtcagggtcatattttcctgctctgcatgtttttcagtcagcgtatccagcgttacggtactggttgcggtgacttcaatcgtgcaaaaataaccgtcatcttcaaaacgtccgacacgaagcacatcacccgttttgaagtggctttcagactcgtcgcggatggtgatggttttacgcccagccagaatgtcatcctggaaacgttgaaaaaaagtgatgtcgtttggctgcatggtactatttcctgtaagaattgactcatctggagcctatgatagtgaaaaaactcaccttaccgaaagatttcttatggggcggcgcagttgccgctcatcaggtcgaaggcggctggaacaaaggcggaaaagggccgagcatttgtgacgttctgaccggtggcgcacacggcgtgccgcgcgaaatcaccaaagaagtcttgccaggaaaatactatccaaaccatgaagccgttgatttttatggtcactataaggaagacatcaagctatttgccgaaatgggcttcaaatgttttcgtacatccattgcctggacgcgcatttttccaaaaggcgatgaagctcagccaaacgaagaagggctgaagttctacgatgatatgttcgatgaactgctgaaatacaacatcgaaccggtgatcaccctctcccactttgaaatgccgctgcatctggtgcagcaatacggtagctggaccaaccgtaaagtggttgatttctttgtacgtttcgcggaagtggtatttgaacgctataagcacaaagtcaaatactggatgaccttcaacgaaattaacaaccagcgtaactggcgtgcaccgctgttcggttactgctgctccggcgtggtgtataccgagcatgaaaacccggaagagacgatgtatcaggtgctgcatcaccagtttgtcgccagcgccctggcggtgaaagctgcgcgtcgcattaacccggagatgaaagtcggctgtatgctggcgatggtgccgctctatccttactcctgtaacccggacgatgtgatgttcgctcaggagagcatgcgcgaacgctacgtctttaccgatgtgcagctacgcggctattacccgtcctatgtgttgaacgagtgggagcgtcgcggatttaacatcaaaatggaagacggcgatctggatgtgctgcgtgaaggcacctgcgattatcttggtttcagctattacatgaccaatgcagtgaaggccgaaggcggcaccggcgatgcgatctctggttttgaaggcagcgtaccaaacccgtatgttaaagcatctgactggggctggcagattgatccagtaggtctgcgctatgcactttgcgaactgtatgagcgttatcagaggccgctgtttattgtcgaaaacggttttggcgcttacgacaaagtggaagaagatggcagcatcaacgacgactaccgcattgactacctgcgcgcccatatcgaagagatgaaaaaagcggtgacttacgatggcgtggatctgatgggctacacaccgtggggctgcatcgactgcgtgagcttcaccaccgggcagtacagcaaacgctacggctttatctatgtgaataaacatgacgacggtactggcgatatgagccgtagtcgtaagaagagctttaactggtacaaagaggtgattgccagcaacggcgagaagctttaagtcgatgaagtaccggatgcaatacttgttgcatccggtcagacaacttccctgttttatttcccgcccgccaaatcgataaaacttcccgtgacgtaagaggctttatcacttagtagccagacaatggcctgcgcgacctcttctgcctgtccaccacgctgcatggggatgttgctcttaacgcgatcgacgcgtccaggctcgccgccgctggcgtgcatttcggtataaataaaccctggccgcacgcagttaacgcggatcccctgcgcggcgacttccaggcttagtccggtggttaacgtatcaatcgcccctttgcttgccgcgtaatcaacatattcccctgggctacccaaccgactggccacgctagagacattgacgatagcgccgccactgccaccatttttaagcgccatgcgttttaccgcctcgcggcagcagagaaaatatcccgtcacgttggtggaaagtactcggttgattcgctctgcggtaaggttttcaacggtgcactgggtaaacaagatcccggcgttattgaccagcgctgctagcggttcatcgtgctgatcgattgctgtaaacatcgcaacgacctggttttcgtcgctgatatccgcctggagcacgaatgctttgccaccggcttgcgttattaagttcatcacttcctgcgccgcgtggaggttttgctgataattaaccgccaccgtatacccttcttgcgccaacagtaatgcagttgcccgcccgatgccgcgactgccaccagtcacaagtgctatagccatttgtttttccgagaaaaattaattcgttgacgtatctttgagattgctaacaaactggctcaatcttcaatgttggcacgcttttccccctcgccctttcagggagagggccggggtgagggtaaatattcgcgccagtgccggcctgttcccctcaccctaaccctctccccaaaggggcgaggggactgtctgagcacttttgtactttgtcatctgactaaaaaggcgccgaagcgcctttagaaaatagtcgaatcagtgaattactggtattcgctaatcggtacgcaggagcagaacaggttacggtcgccgtaaacatcatccagacgtttcactgtcggccagtatttgtctgccacacctgccgggaataccgcaacttcacggctgtacggatgcgcccactcggcgaccagttcgctctgaatgtgcggcgcgttcaccagcgggttatcttccagcggccagacaccggctttcacctggtcaatttctgcgcggatagccagcatcgcgtcgataaagcgatccagttccactttgctttcagattcagtcggttcaaccatcagcgtacccgccaccgggaagctcatcgtcggcgcgtggaaaccgtagtcgatcaggcgcttggcaatatccagctcgctgatgccggtttcttctttcagcgggcgaatatcgagaatacattcgtgcgccacgcgaccgtcgcgaccggtatacagcaccgggaaggcatcctgcaggcggctggcaatatagttggcgttgaggattgccacctggcttgcttttttcagcccttctgcgcccatcatgcggatgtacatccagctgattggcaggatagaggcgctaccgaacggtgccgcagaaaccgcgccctgacgggttaacatgccttcgatttgcaccacgctatgacccggtacaaacggtgccaaatgcgctttcacgccgatcggtcccatacccggaccaccaccgccgtgcggaatgcagaaagttttatgtaggttaaggtgactaacgtccgcaccaataaagcccgggctggtgatgccaacctgggcgttcatgttcgcgccatcaaggtaaacctgaccgccgaactgatgcacgacttcacacacttcacggatcgtttcttcatacacgccgtgggtagaaggataagtcaccatgatacaggagaggttatcgcccgcctgttccgctttcgcgcgcagatcagtcagatcgatgttgccgtttttatcacacgccacaaccaccacctgcattcctgccatatgtgcagaagcggggttagttccgtgcgcagaagccgggatcaggcagatatcgcgatgcccttcgttgcggctttcatgataatgacgaatcgccagcaggcccgcgtattcgccctgtgcgccagagttcggctgcatacaaacggcgtcgtaaccggtcagtttcaccagccagtcagccagctgcgcaatcatctgctgataaccttcggcctgctccggcgggcagaacgggtgcagttcggcaaattccggccaggtgattgggatcatctcggcggcggcgttcagtttcatggtgcaggaacccagcgggatcatcgcctgattcagcgccagatctttacgctccaggctgtgcatatagcgcatcatttcggtttcgctgtggtagcgattaaacaccggatgggtgaggatttcgtcgtcgcgcagcatcgcaggctggatagagcggctgtcgtgagccacgtctttgtccagcgtgtcgatgtccaggccgtggttatcgcccagcagcacgttgaaaagctgcattacgttttcacgcgtggttgtttcatcaagggtgatcccaaccgcgttcagaatatcgctacgcaggttgatttcagccgcttcggcacgcgtcagtacgcccgctttgtcggccacttccacacacaaggtgtcgaaatagtgcgcatggcgcagtttcagacctttttgttgcaggcccgccgccaggatatcggtcagacggtgaatgcggttagcgatacgtttcaggccaaccgggccgtgataaacggcatacaggctggcgatgtttgccagcagtacctgggaagtacaaatgttggagttcgctttctcacggcggatatgttgctcgcgagtctgcatcgccatgcgcagcgcggtattgccagctgcatctttgcttacaccgataatacggcccggcatactgcgtttgtattcatctttcgccgcaaagaatgccgcgtgtgggccaccgtagcccatcggcacgccgaagcgttgcgcgctaccaaaaacaatatccgcgccctgtttacccggcgcagttaacagcaccagcgccataatatcggcggcaacgctgaccacaattttgcgacttttcagttcgctaataagcgcagtgtagtcgtgaatttcaccggtagtgcctacctgctgtaacagcacgccgaagacgtcctgatggtcgagcactttttgcgcgtcatcgacaatcacttcaaaaccaaaggtttcggcacgagtacggaccacatccagcgtttgcggatgcacatcggaagccacgaagaagcggttggcatttttcagtttgctgacgcgtttcgccatcgccattgcttcggcggcagcggtggcctcgtccagaagagaagcagaggccatatccagtccagtcaaatccagcgttacctgctggaagttgagcagtgcttcaaggcggccctgggagacttcaggttgatacggagtgtacgcggtataccagcccggattttccagcatgttacgcaggataaccggcggtagctgcacggcggtgtaacccatgccgatgtaagacgtgaagcgtttattgcgactggcaatagccttgagttctgccagtgcggcgtattcggtcgccggtgcgccaacctgcggtggtgtcgcaagttgaatatctttcggcacaatctggccggtcagcgcgtttaagctttgtgcaccaacggcattcagcatttcttgctgttgcgcggcgtccggtccgatatggcgttcaataaaagcgccgctgttttcaagctggcttaacgtctgtgtcatgagcgatggttcctgaaacgtgcagtgaattgtgaacctctctccttacgaagagagtgagggtgaggcataaattttcctcaccctgatcctctcccgcagaagaggaataaagccgttactcgtcttctaacaatgcttcgtatgcggtcgcatccagcagactttccagttcgctttcatcgctggctttgattttaaagatccagccgcctgcatacggttcgctgttcaccagttccggggaatcgctcagtgcgtcgtttaccgccacgatttcaccgcttactggcgcataaatgtcactcgccgcttttacgctttcggcaaccgcgcagtcatcgcccgcgctaaccgttgcgcccacttccggcaggtcaacaaacaccatatcgcctaacagctcctgagcatgttcggtaataccaacggtgtaagtgccgtcggcttctttacgcagccattcgtgttctttgctgtatttcagttctgctggtacgttgctcatcaatcaatctccaaaaaagtaaatcacgcgacggctttgccgttacgcacaaaaacaggttttgtcactttaaccggcatttcacggttgcgaatttgcacaatcgccgtttcgccaataccttccggcacgcgcgccagcgcaatgctgtaacccagcgtcggggagaaagtaccgctggtgataatgccttcatgctggttgccctgcgcatcggtaaagcgtaccggcagttcattacgcagcacgcctttttcggtcatcaccagaccaaccagtttttctgtaccatgctcacgctgcacttccagggcttcacgaccgataaagtcacgatctgccggttcccaggcgatggtccagcccatgttggcggctaaaggagagatggtttcgtccatctcctgaccataaagattcatgcccgcttccagacgcagcgtgtcacgcgcgcccaagccacatggcttaacacccgcttccaccagcgcacgccagaaatcggccgctttttcattgggcagcgcaatttcatagcccgcttcaccggtataaccagtggtggcaataaacagatcgcccgcctgcacgccaaagaacggtttcatcccttccaccgcctgacgctgggcgtcattaaacagtgtggcagcttttgcctgcgcattcggcccttgcacggcaatcatggaaaggtcatcacgaacggtaatttcgatgccgaaaggttcagcgtgttgggtaatccaggagaggtctttttcgcgggtggcggagttaacaacgaggcggaagaaatcttcagtaaagtagtagacgatgaggtcatctatcacaccgccagaggcattcaacatcccgctgtaaagggctttgccgcttttggtgagcttcgccacatcgttcgccagcagataacgcagaaactcccgggtgcggctgccgcgaagatcgacgatggtcatatgactcacatcaaacattccggcatcggtacgtaccgcatgatgttcgtcgatttggctaccgtaatgcagcggcatcatccagccgtggaaatccaccatgcgagcgccgcaaagcgtgtgttgttcgtacaaaggagtctgttgtgccatcttgtcctcattgaataagcggggctgacaactttttcatggtgaaattatcaccacgaaacccagcatcggagccactcccggtccccaacgcaatcgttctcttttgcctgaacttaccaccgaaacagactgttaaccataaggtaaaattgatcatcacattagcttatggttaaaaaatgcaaaaatcgcgacagaataaaaaaccaaaaaatacaccagtttctatacaaagatgatgtgatgagaaagtcaatttgaataagacaatattaagagctaaaaaaatgtcaaaaaacactaaatcaaaaaataatggcattagaaaatataatgcgaaaacggaggtgaaattagtttatttcaaatgaggaaaatctcccggcgaaaaaaccgggagatgaaagtgtgatgggtatcaaataaacaacagaggagaaatttttaacgcagccattcaggcaaatcgtttaatcccattgcctggcggataagttgcggcttaacgccaggaagcgtgtcggccagtttcaaaccaatatcacgcagcagttttttcgccggattggtaccggaaaacagatcgcggaatccctgcataccagccagcatcaacgccgcactgtgcttgcggctacgctcatagcgacgcagataaatgtactgcccgatgtctttcccctgacgatgcaaccgtttcagttcggcaatcagctctgcagcatccataaagccgagatttaccccctgccccgccagcgggtgaatggtatgtgcggcgtcgcccaccagcgccagacggtggctggcaaactggcgcgcataacgccccgtcagtgggaacacctgacgcgcgctctcaaccttgcataagcccaggcgattatcaaaagcgatatttaacgcgcgattaaattcgtcttcacttgcctgctgcatccgctgcgcttcctctgggctcagactccagacaatgctgcaaagatgcggatcgctaagcggtaaaaaggccagaatgccttcgccatggaaaacctgccgcgccaccgcatcatgcggttcttccgtgcgaatggtcgctaccagcgcgtgatgctgataatcccagaaagtcagcggaatatcggctttgttgcgcaaccaggaattagcgccgtccgcgccaatcaccagacgcgccgttaacatgctgccatctttcagcgtcaggaaggtttcattttctccccaggcgacctgctgtaattctgcgggggctaacagagtgatatcactgctctgatgcgctttgttccacagcgcgtagtgaatcacactattttcaacgatatgcccaagatggctatagcccatgctttgatcgtcaaagctaatgtgaccaaagctgtctttgtcccacacttccataccgtgataacagctggccctacgagagagaatgtcctgccagacgccaagacgggtgagtaatttttcgctggcggcattgatagcgctaacgcgcagttgtggtggtgcattcgccgccagaggttcctgtacgcgctgctccagtacggcaacgcgtaagccgctcccctgtaagccacaggcaaccgccagccccaccatgccgccgccaacaatggctacatcaacactttgcattgtttattccttaaaaccgccttcaacgcgccacccaaccgagggtgcgctgcgccagcacatcgcgtgccggggtgaataattccatcgtcatcagcccgatgttgcgcccgacaaccagcggtgcccaacggttggcaaaaagatgtacaaggctgtccgtgacgccaatggttgcttcgcgatcgctctgtcgacgctgctgataacggcacaatacgccgtaatcccccatgtcttctccgcgctcctgcgcctgagtcagggtttccgcaagactcatcacatctcgcataccgaggttaaacccttgcccggcaatcgggtgcagagtttgcgccgcattgcccaccagcacggtacgatgggtaatagatctggcggcgtgggttaacgccagcggataagcactgcgtttaccagcgtgggtaattttcccaagtcgccagccaaaggcgctctggagttcacggcaaaacttctcgtcactccagctcaacacctcttcgcgccgttccagtggatgacaccagaccaggctacagcgtccgtcagacatcggcaacatcgccagcgggccatgttgcgtaaagcgttcaaaagcgcgcccttcatgcgcaacggaagtagcaacgttggcaatcacggccagttgttcgtaaggctcctgctgccagtcaacgccgcacgcggtggctaacgcactatgggtgccatcagctgctaccagcacgcggcccgtcagcgtctcgccactctccagcgtcacttcaacgtgactctgagtacgggcaacgttagccacgcgatcagggcaatgcagcgttacgccaggtgctttacgcagcaatgcaaacagccgttgcccgacattgtgcaattcgacaacctgtcccagcgccgccagttggtaatcttctgcggcgagggtgacaaatccagcgtgaccacgatcgctgacatgcacggtggtgatggcagttgcgcaatccgccagagattgccagacgccgatgcgcgccagttgctgacaggtacccgccgccagcgctatcgctcgtccatcaaagcccggatgagcatgactctctggcgcagtcgcttcaatcaaatgtaccggcagcgccccgtgacttaaccgggaaatagccagcgccagcgtcgcgcccgccatgccgccaccgacgatgattacgctcattgctttctcgcagcaaccatcaacgcttcgatttcttccggctttttcaccacgctggcggtgaggttttcgttaccggtttcggtaatcacaatgtcgtcttcaatacgaatgccgataccgcgatattgttctggcacttctgcatccggcgcaatatacagccctggttctacggtcagtaccatgcccggttccagaatgcggctgcgatcctgaccataaacacccacgtcatggacatccagtcctaaccagtggctaaggccatgcataaagaaaggacgatgggcgttctgagcgatcagttcatcaacatcacctttcaggatgccgagttttaccaggccgctaaccatgatgcgcaccacttcaccagtgacttccagaatggaagttcccggacgatacaggcgcaggctggtttcgagagactccagcacaatgtcgtagatttcacgctgggcctgggtgaatttgccgttgaccgggaaggtgcgggtaatatcgccagcgtaacctttgtattcacaacccgcgtcaatcaacaccaggtcgccgtcgcgcatttcacactcgttttcggtgtagtgcagaatgcagccgttttcaccgctgccgacaatggtgttataggacggatagcgcgcaccgtggcggttaaattcgtggtgaatttcgccttccagatggtactcgaacattcccggacggcatttttccatcgcccgtgtatgtgccatggcggtgatttctcccgcgcggcggagtacggcaatctcttctgggcttttgaacaggcgcatttcatgaacaacaggacgccagtcgatcatcgttgccggtgcggtgagattttgccggctacctttacgcagtttttccagcgcactgttcacgattacatcagcatatgcatattcgccctgggcatggtaaaccacatccaggccgttaagtagttgataaagttgctgattgatttcgctgaatgccagtgcgcggtcaacgcccagtttctctggcgcggcatcctggcctaagcgacggccaaaccagatctccgccgtcaggtcgcgaacgcggttaaacagaacgctgtggttatgagtgtcatcgcttttaatcagcaccagcaccgcttccggttcgttaaagccggtgaagtaccagaagtcactgttctgacgataggggtattcgctgtcggcgctacgtgttacttctggtgcagcaaaaatcagcgcggcgctgccgggttgcatttgctccaccagggcctgacggcgacgctgaaactcttgccgggatatctcactcataacactctccttacgttttttgtttttagtgtagagtcggtttttgtacttctggcgcggtcggttgcggatgagtaaaggtgtcgtggcataacagcgcggcaacacgaacgtattcgatgatctcttcaaggctcatttcaagctcttcctgatcttcgtcttcgtcgtaacccagttgcgcaatgttacgcagatcgtcgatagcttcaccggtttcgccggtcactttatccagcttcggttgcgtaacgccaagaccaagcaggaagtgattgacccaacctgccaatgcatcagcccgatcgaaaacgctgacatcatcgccatcaggcagataaagctgaaaaaggaagccgtcatcctgcagggcatcgctggtggcagagtgcattttacgcagtgcctgtgccagctcatgaccgaaagccatgccttcgttcgtcaggtcgtgaagtagcggtagccaactgctgtcatcgttaccgccacatatcatcccgctgattaaaccatgcatctcagctggggtcagacccgtcccttgttggttcagatactggttcatttcgttgtaaccaggcatttcgttctgtatagacataagcattcgtcgtcaaagggaggaatattcatgatatgctaccactttgggccctggtggaccagaaaagggcttgtctcttctcatcagggtagctatagtgtcgccccttcgcagaccatgggtctaaagacgaaggcagcgcagtcaatcagcaggaaggtggcatgtctgcacaacccgtcgatatccaaatttttggccgtagtctgcgtgtgaactgcccgcctgaccaaagggatgcgttgaatcaggcagcggacgatctgaaccaacggttgcaagatctgaaagaacgcactagagtcacaaatactgaacagttggtcttcattgccgcattgaatatcagctatgagttagcgcaagaaaaagcaaagactcgtgactacgcggcaagtatggaacagcgtattcggatgctgcagcagaccatagaacaagcgttacttgaacaaggtcgcatcaccgaaaaaactaaccaaaactttgaatgacacttttcggtttactgtggtagagtaaccgtgaagacaaaatttctctgagatgttcgcaagcgggccagtcccctgagccgatatttcataccacaagaatgtggcgctccgcggttggtgagcatgctcggtccgtccgagaagccttaaaactgcgacgacacattcaccttgaaccaagggttcaagggttacagcctgcggcggcatctcggagattcccttcttatctggcaccagccatgacgcaactaccagaactcccactgacattatcccgacaagaaatccgcaaaatgattcggcaacgtcgtcgtgcgttaacgccggaacaacagcaggaaatgggtcaacaagccgctacccggatgatgacttatcccccggtggtgatggcacatacggtcgctgtattcctctcttttgatggcgaactcgacacccagccactcatagaacaactctggcgcgccggtaagcgcgtatatcttccagttttgcatccctttagtgccggtaatttgctgttcctgaattaccatccgcaaagcgaactggtgatgaacaggttgaagatccatgagccaaaattggatgtgcgtgacgtgctacccctttcccgattagacgtgctgatcacaccgctggtcgcctttgatgagtacggtcagcgcctgggaatgggcggtggtttttatgatcggaccttacaaaactggcagcactataaaacgcaaccggtgggttatgcgcatgattgtcagttggtggaaaaactccccgttgaagagtgggatatccctcttcctgcggtggttacaccgagcaaagtctgggagtggtaagggcgatacacccgcatcgccctgattgacatcgttgattctttgacctaatttagtgagtaagggtaagggaggattgctcctcccctgagactgactgttaataagcgctgaaacttatgagtaacagtacaatcagtatgatgacaagtcgcatcataacccttctccttcaagccctcgcttcggtgagggctttaccgttacagccccatgctgccctgccatcgtaaatccccattaaataaacacaacgcattgatctgactttgatttattttctggagcagactcgcaaagtagaatgcgcaacgcggcaacggtgtggagaagggataaaaaaacgggcaagtcagtgacctgcccgttgattttcagagaaggggaattagtacagcagacgggcgcgaatggtacccggaatagctttcattgcctgcagcgctttttcggcaacgtcttcgtcggcttcaatatcaataaccacataacccatctgggcggaagtttgcagatattgcgcggcgatgttgacgccctgctcggcgaagattttgttcagcgcagttagcacgcccggacggttttcgtggatgtgcatcagacgacgcccaccgtgcagtggcaggctgacttccgggaagttcaccgcagagagcgtactgccattgtcagaatacttgatcaatttacccgcaacttccaggccgatattctcctgcgcttcctgagtgctaccgccaatgtgtggcgtcagaaggacgttgtcgaattcacacagcggagaggtaaatggatcgctattggtcgccggttccgtcgggaatacgtcgattgccgcccccgccagatgtttgctcgccagcgcatcacacagcgccggaatatccaccacagtaccgcggctagcattaatcagcaggctgccgggcttcattagactaatttctttcgcgcccatcatatttttggtggacggattctctggtacatgcagactcaccacatcgctcatattcagcaggtcagaaagatgctgtacctgagtggcgttgcccagcggcagtttattttcaatatcataaaagtaaacatacattcccaggctttcagccagaatgcccaattgcgtaccaatatgaccgtagccgatgatacccagctttttgccgcgcgcttcaaaagaacccgccgccagtttgttccacacgccacggtgcgctttagcattggcttccggcacgccgcgcaatagcagcagcagttcgccaatcaccagctccgcaacagagcgcgtattactgaacggtgcgttaaataccgggatcccgcgctttgccgccgcatccagatcaacctggtttgttccgatacagaaacagccaatagcgaccagtttttctgcggcgttgatcacgtcttcagtcagatgggtacgggatcgcaggccgatgaagtgggcatcgcggatggattcttttaattgttcatcatccagcgcgcctttgtgaaattcgatgttggtgtaaccagctgcacgaaggctttccagcgccttttggtgcacgccttctaccagcagaaacttaatcttgtctttctccaggcttacctttgccatttacccaatcctgtcttttgaaatgttgtgtgcggatttgcatccgcctttcaacatatcaaaaaataatattgcggcaatatgaacgtttgcgtcgcgatgttgaggaaatatcacgcaaaggtaattcttggatgaatatgctggtttagaggatttatttagagcaatcgacaattgcctggtaaaagcgtgacacatgtcaccaaatttaatgaagagaatttttttaacgggggaggttcccccgtcagatcatttcacaatggttttgacaccgtcaggtgtgccaatcagcgcaacgtccgcgccacggttagcaaacaagccaacagtcaccacgccaggaatcgcatttatggcgttttccatcgctatcgggtcaaggatttccatgccgtggacgtcgaggatcacgttgccattatcggtcaccacgccctgacggtattccggacgaccgcccagtttcaccagctgacgcgccactgcactacgtgccatcgggataacttctactggcagcgggaatttacccagaatatcaacctgcttggaagcgtctgcaatacagataaatttttctgcaacgctagcaatgattttttcacgggtcagcgccgcgccgccgcctttgatcatttgcatgtggccgttgatttcatctgcgccatcaacgtagatgccaaggctgtcgacttcgttgagatcaaaaacgtgaatgccgaggcttttcagtttttcagtggaagcatcactactggaaacggccccttcaatctggcctttcattgtaccgagcgcgtcaataaagtgtgcggcggtggaacctgtacctacaccaacaatggtgccgggctgaacatactgaagtgccgcccatcctactgcttttttcaattcatcctgcgtcatgatcgtttcgcctgtggtatgaaatttcacacgcattatatacaaaaaaagcgattcagaccccgttggcaagccgcgtggttaactcatccataaaatatcgcgcaatggcaggcatcccctttcgccccgcaaataaagcatacaacggtctgggtatgccgctccacggtgcaaacaggcgcaccagttcaccgttcgcaagcccctgtttacaggcaaattgaggcaataacgccacgccattcaacacaaccagggcgcgaactcgctgagcgaaatgcattagcgcaaatccctgatcttttaagctgcgcttttaaccacggatacaaatgttacccgccgacggcttcggtatatgcaacctgacacaaaattgtgtcatagtgcaggaaaaagcatttaccaggagcagacaacagcaatgaaacgcccggactacagaacattacaggcactggatgcggtgatacgtgaacgaggatttgagcgcgcggcacaaaagctgtgcattacacaaagtgccgtcagtcagcgcattaagcaactggaaaatatgttcgggcagccgctgttggtgcgtaccgtaccgccgcgcccgacggaacaagggcaaaaactgctggcactgctgcgccaggtggagttgctggaagaagagtggctgggcgatgaacaaaccggtagcactccgctgctgcttagtctggcggtcaacgccgacagtctggcgacgtggttgcttcctgcactggctcctgtgttggctgatagccctatccgcctcaacttgcaggtagaagatgaaacccgcactcaggaacgtctgcgccgcggcgaagtggtcggcgcggtgagtattcaacatcaggcgctgccgagttgtcttgtcgataagcttggtgcgctcgactatctgttcgtcagcagtaaaccctttgccgaaaaatatttccctaacggcgtaacgcgtagcgcattactgaaagcgccagtggtcgcgtttgaccatcttgacgatatgcaccaggcctttttgcagcaaaacttcgatctgcctccaggcagcgtgccctgccatatcgttaattctagtgaagcgttcgtacaacttgctcgccagggcaccacctgctgtatgatcccgcacctgcaaatcgagaaagagctggccagcggtgaactgattgacttaacgcctgggctatttcaacgacggatgctctactggcaccgctttgctcctgaaagccgcatgatgcgtaaagtcactgatgcgttactcgattatggtcacaaagtccttcgtcaggattaatccatcaaataatgcctgatagcacatatcaggcgttgtcctcacttctttttgtattccttgaatcacatcacaaaatagacaaatctcaggcggcaaaaaacgacgtctgaatgcattttttttgctggcgacaaacccacgtaaaaagctcaccgtaggcgcaaataccctcattttgattgcgttttacggagcaaataatgtctaacgtgcaggagtggcaacagcttgccaacaaggaattgagccgtcgggagaaaactgtcgacagcctggttcatcaaaccgcggaagggatcgccatcaagccgctgtataccgaagccgatctcgataatctggaggtgacaggtacccttcctggtttgccgccctacgttcgtggcccgcgtgccactatgtataccgcccaaccgtggaccatccgtcagtatgctggttttagtacagcaaaagagtccaacgctttttatcgccgtaacctggccgccgggcaaaaaggtctttccgttgcgtttgaccttgccacccaccgtggctacgactccgataacccgcgcgtggcgggcgacgtcggcaaagcgggcgtcgctatcgacaccgtggaagatatgaaagtcctgttcgaccagatcccgctggataaaatgagcgttagcatgaccatgaatggcgcagtgctaccagtactggcgttttatatcgtcgccgcagaagagcaaggtgttacacctgataaactgaccggcaccattcaaaacgatattctcaaagagtacctctgccgcaacacctatatttacccaccaaaaccgagtatgcgcattatcgccgacatcatcgcctggtgttccggcaacatgccgcgatttaataccatcagtatcagcggttaccacatgggtgaagcgggtgccaactgcgtgcagcaggtagcatttacgctcgctgatgggattgagtacatcaaagcagcaatctctgccggactgaaaattgatgacttcgctcctcgcctgagcttcttcttcggcatcggcatggatctgtttatgaacgtcgccatgttgcgtgcggcacgttatttatggagcgaagcggtcagtggatttggcgcacaggacccgaaaagtctggcgctgcgtacccactgccagaccagtggctggagcctgactgaacaggatccgtataacaacgttatccgcaccaccattgaagcgctggctgcgacgctgggcggtactcagagtctgcataccaacgcctttgacgaagcgcttggtttgcctaccgatttcagtgcacgcattgcccgcaacacccagatcatcatccaggaagaaagtgaactctgccgcaccgtcgatccactggccggatcctattacattgagagcctgaccgatcaaatcgtcaaacaagccagagctattatccaacagatcgacgaagccggtggcatggcgaaagcgatcgaagcaggtctgccaaaacgaatgatcgaagaggccagtgcgcgcgaacagagcctgatcgaccagggcaagcgtgtcatcgttggtgtcaacaagtacaaactggatcacgaagacgaaaccgatgtacttgagatcgacaacgtgatggtgcgtaacgagcaaattgctagcctggaacgcattcgcgccacccgtgatgatgccgccgtaaccgccgcgttgaacgccctgactcacgccgcacagcataacgaaaacctgctggctgccgctgttaatgccgctcgcgttcgcgccaccctgggtgaaatttccgatgcgctggaagtcgctttcgaccgttatctggtgccaagccagtgtgttaccggcgtgattgcgcaaagctatcatcagtctgagaaaagcgcctccgagttcgatgccattgttgcgcaaacggagcagttccttgccgacaatggtcgtcgcccgcgcattctgatcgctaagatgggccaggatggacacgatcgcggcgcgaaagtgatcgccagcgcctattccgatctcggtttcgacgtagatttaagcccgatgttctctacacctgaagagatcgcccgcctggccgtagaaaacgacgttcacgtagtgggcgcatccagtctggctgccggtcataaaacgctgatcccggaactggtcgaagcgctgaaaaaatggggacgcgaagatatctgcgtggtcgcgggtggcgtcattccgccgcaggattacgccttcctgcaagagcgcggcgtggcggcgatttatggtccaggtacacctatgctcgacagtgtgcgcgacgtactgaatctgataagccagcatcatgattaatgaagccacgctggcagaaagtattcgccgcttacgtcagggtgagcgtgccacactcgcccaggccatgacgctggtggaaagccgtcacccgcgtcatcaggcactaagtacgcagctgcttgatgccattatgccgtactgcggtaacaccctgcgactgggcgttaccggcacccccggcgcggggaaaagtacctttcttgaggcctttggcatgttgttgattcgagagggattaaaggtcgcggttattgcggtcgatcccagcagcccggtcactggcggtagcattctcggggataaaacccgcatgaatgacctggcgcgtgccgaagcggcgtttattcgcccggtaccatcctccggtcatctgggcggtgccagtcagcgagcgcgggaattaatgctgttatgcgaagcagcgggttatgacgtagtgattgtcgaaacggttggcgtcgggcagagcgaaacagaagtcgcccgcatggtggactgttttatcagcttgcaaattgccggtggcggcgatgatctgcagggcattaaaaaagggctgatggaagtggctgatctgatcgttatcaacaaagacgatggcgataaccataccaatgtcgccattgcccggcatatgtacgagagtgccctgcatattctgcgacgtaaatacgacgaatggcagccacgggttctgacttgtagcgcactggaaaaacgtggaatcgatgagatctggcacgccatcatcgacttcaaaaccgcgctaactgccagtggtcgtttacaacaagtgcggcaacaacaaagcgtggaatggctgcgtaagcagaccgaagaagaagtactgaatcacctgttcgcgaatgaagatttcgatcgctattaccgccagacgcttttagcggtcaaaaacaatacgctcagtccgcgcaccggcctgcggcagctcagtgaatttatccagacgcaatattttgattaaaggaatttttatgtcttatcagtatgttaacgttgtcactatcaacaaagtggcggtcattgagtttaactatggccgaaaacttaatgccttaagtaaagtctttattgatgatcttatgcaggcgttaagcgatctcaaccggccggaaattcgctgtatcattttgcgcgcaccgagtggatccaaagtcttctccgcaggtcacgatattcacgaactgccgtctggcggtcgcgatccgctctcctatgatgatccattgcgtcaaatcacccgcatgatccaaaaattcccgaaaccgatcattagcatggtggaaggtagtgtttggggtggcgcatttgaaatgatcatgagttccgatctgatcatcgccgccagtaccagtaccttcagtatgacgcctgtaaacctcggcgtcccgtataacctggtcggcattcacaacctgacccgcgacgcgggcttccacattgtcaaagagctgatttttaccgctagcccaatcaccgcccagcgcgcgctggctgtcggcatcctcaaccatgttgtggaagtggaagaactggaagatttcaccttacaaatggcgcaccacatctctgagaaagcgccgttagccattgccgttatcaaagaagagctgcgtgtactgggcgaagcacacaccatgaactccgatgaatttgaacgtattcaggggatgcgccgcgcggtgtatgacagcgaagattaccaggaagggatgaacgctttcctcgaaaaacgtaaacctaatttcgttggtcattaatccctgcgaacgaaggagtaaaaatggaaactcagtggacaaggatgaccgccaatgaagcggcagaaattatccagcataacgacatggtggcatttagcggctttaccccggcgggtagcccgaaagccctacccaccgcgattgcccgcagagctaacgaacagcatgaggccaaaaagccgtatcaaattcgccttctgacgggtgcgagtatcagcgccgccgctgacgatgtactttctgacgccgatgctgtttcctggcgtgcgccatatcaaacaagctccggtttacgtaaaaagatcaatcagggcgcggtgagtttcgttgacctgcatttgagcgaagtggcgcaaatggtcaattacggtttcttcggcgacattgatgttgccgtcattgaagcaagcgcactggcaccggatggtcgagtctggttaaccagcgggatcggtaatgcgccgacctggctgctgcgggcgaagaaagtgatcattgaactcaatcactatcacgatccgcgcgttgcagaactggcggatattgtgattcctggcgcgccaccgcggcgcaatagcgtgagcatcttccatgcaatggatcgcgtcggtacccgctatgtgcaaatcgatccgaaaaagattgtcgccgtcgtggaaaccaacttgcccgacgccggtaatatgctggataagcaaaatcccatgtgccagcagattgccgataacgtggtcacgttcttattgcaggaaatggcgcatgggcgtattccgccggaatttctgccgctgcaaagtggcgtgggcaatatcaataatgcggtaatggcgcgtctgggggaaaacccggtaattcctccgtttatgatgtatagcgaagtgctacaggaaagcgtggtgcatttactggaaaccggcaaaatcagcggggccagcgcctccagcctgacaatcagcgccgattccctgcgcaagatttacgacaatatggattactttgccagccgcattgtgttgcgtccgcaggagatttccaataacccggaaatcatccgtcgtctgggcgtcatcgctctgaacgtcggcctggagtttgatatttacgggcatgccaacagtacacacgtagccggggtcgatctgatgaacggcatcggcggcagcggtgattttgaacgcaacgcgtatctgagcatctttatggccccgagcattgctaaagaaggcaagatcagtaccgtcgtgccaatgtgcagccatgttgatcacagcgaacacagcgtcaaagtgatcatcaccgaacaagggatcgccgatctgcgcggtctttccccgcttcaacgcgcccgcactatcattgataattgtgcacatcctatgtatcgggattatctgcatcgctatctggaaaatgcgcctggcggacatattcaccacgatcttagccacgtcttcgacttacaccgtaatttaattgcaaccggcagcatgctgggttaatgactcgtcccgtcacgatcttcagcaatatgctgaagcatcgtggcggtataacgatgatttctgatactataaagatattcctgcatatacatcggcctgtgcggtgcatcaaaatatttcagcgttgccggattcaccagtcgccaggcaaaatgcgggatcaccgtcagaaaatgtccgcgctccacggcgctgattttggccataaaactgtagggacgataaataatggttggattgatcccacaaggtcgcatattcgcatcaatcattgcttcgaagttggcccggttctgaaagcgcatttgtagccagggcagctcctgaagcagctcttgctcttgtcgctcttcataacggcgagaaacgagaaagcctaatcgcagcggtggtagttcactgatagtcaggttttccagttcctgaactcgtgcagatacatgctgtggggagataataaaatctaactggcggtcaaaaagattatcgataacgccattttcgctgaactcaactggctgggcggtcacgccttcatacttatctccgagactaatcaactgatcgaaaataattgtcggataagtattatctatgccaatcacaatttctcgactacgacgcccactgttatggatttcattatcaatcgcagaaagccgttgataaaccgggaacagtttttgatacagttcctgtccggctttattgaggctgatattattatctttgcgggtaaatagcgtatagccaatttgttcttccagcgcggcaatgcttttaccaaatgggctagccgtcatatggattttttctgccgcccgggcaatattattggtttgcgctaataaaatgaaattgcgcatctttttgctaataaaaatgtccatccccctcccccgcatccttgtccgcttaaccgtttcagtcagcctatccttgatgaaaccgcgagcaaagataggtgattacgtcatggttttacagaaaattacagaaaaaggaggcaatatcgggtaaaggcattagcccgacgaatacgtcgggctacaaatattattgtgctgcaggtgttttagcgggttgttgatccacaggttctaactggaagaccacatcgacctgatcatcaaactgaatagcggcctgctcgtaagtttcctgggcggacaccggcgcggcatcggctttcatcatccgcaccattgggctgggctgatagttggaaacatggtagcgcacgctatataccggccccagtttacgatgaaagccgttcgccagttcctgcgcctgatgaatcgcgttatcaatcgctgccttacgcgctttgtctttataggcatccggctgcgccacgcccaggctcacagaacgaatttcgttaagacccgccttcagcgcgccatccagcaaggaattcagtttgtctaactgacggagcgtgacttccaccgttctcacagcgcggtagcctttaaggatacttttaccatcctgataatcataatctggctgggtgcgtaagttcgcactgctgatatcttttttcgcgatctgattgagttcaaggaaggaaatgtattgtgcgacgcgctcatctgcctgtttcttggcagtagcggcatccttcgcggccacgttaacttcaatcgcaagagtggcaatgtctggcaccgcatccacgcttgccgtaccggaggtgacaatatgcggtccatccggcaattcgttagcctgcgctgccatcccgctaatacccattaatgccgccagggcgataactttgaacttcacgttagtctctccgtgttaattgacttgcccaaaattcaggacctctggaggcaagcttagcgcctctgttttatttttccatcagatagcgcttaactgaacaaggcttgtgcatgagcaataccgtctctcgccagctgcaaggcaataaaccacataacacatcccacaaccagattgataatgcgctgtgcttttgccgtgcgcagacgcggtgccagccaggctgcgagaagagccagaccaaagaaccacaggaaagaggcgctaattgtcccgagtgcaaaccagcgttttggttccacatcaagttgcccgccaaggctgcccagtacaacaaaagtatccaggtaaacatgcggattcagccaggtcactgccaacatggtggcgataattttccatctgccttgcttcatgacttcggcgctggctaactcaatattactgctcattgctgttttaaaagcgccaaaaccataccacagcaagaaggctacgccgccccaggtgaccagcgccagcaaccacgggctctgcatcaataacgcgctgccaccaaaaatcccggcgcaaatcaggaccaaatcgctgatagcacaaagtaaggcaatcataatgtggtactgacgacgtatgccctgattcatcacaaaagcattttgtggaccgagcggtaggatcatagccgccccaagtgcaagaccttgaaagtaataagaaaacacgttggatattccgaattaagtatctgatgcagagactatatcgcgggattgttattagcggaaattgataatattaattggcaatcagaaaaactaataagagagaggccagagagtattatctggcctcagcgttgattacgcagctttgtcttctttcacccgcttaaagttcacatccatttgcgggtacgggaagctgataccggcggcatcaaattcacgtttaatacgctccagcacatcccagtacacgttttgcagatcgccgctgttgctccagacgcggaccacgaaattaatgctgcttgcaccaagttcgttcaggcgcacagtcatttcgcgatctttcaaaatgcgatcttcagactggataatattggtcaggatctgcttaacctgatcgatatcggaatcatacgccacgccaataataaattcgttacggcgaactggctcgcgggagaagttaataatatttccggcaataattttaccgttcggaataacgataattttaccgtctgcagtacgcatggtggtggagaaaatctgcacactcagcacagtaccggctacgccgcccaggtcaacatattctccggcacggaacgggcggaacatgacaagtaacacgccagcggccaggttagacagactcccctgcaaagccagaccaacagctaagcctgcggcaccgagtacagcaatgacactcgcggtttgtacacccacgcgtcccagtgcagcgattagcgtaaaggcgataataccgtaacggactaatgcagaaagaaaatcagcaacagtggcatcgattttacgggagatcatcaggcgattcaccgcgttggaaatcatccgcgcgataatcaaaccaacgatgatgatcgcgagtgccgccacgatgtttactgcataacttagcagcagcgcctggttagctaccagccagcttcccgcgccgtttatgctatcgacaacattcaaatcttccattcaatattccttttcaactgactcaaaatggagaaatacactccgccgccttatgacgggcagtctgacaagggtaaacaataaagcataattttgccaaatagatcacagatttctcatctgaatcaccttgcttttggcgaaaaaatccccgcagagcggggctcagacagatatcaatgtgcgctttgtcatgccggatgcggcgtgaacgccttatccggcctacaaaaacctgcaaattcaatatattgcaggatacgtgtaggcctgataagcgtagcgcatcaggcaattttgcttttggcgaaaaaaagacccgcagagcgggccttgagataagcagaaaggaatatcttacagaacgtcgatcgcgttcagttcctggaatgctttctccagacgagcgatcatgctagtctgaccggcacgcagccatacgcgcggatcgtagtatttcttgttcggctgatcttcgcctttcgggttacccagctgaccctgcagataagcttcgttcgctttgtagtagttcagaacgccttcccaggttgcccattgggtatcggtatcgatgttcatttttactacgccgtagcttacggagtctttgatttcctgagcagtagaaccggaaccaccgtggaatacgaagttcaggctgttgtgcggcaggttgtgtttcttggaaacatattcctgagaatcacgcaggatggtcggagtcagaaccacgttacccggcttgtaaacaccgtgtacgttaccgaaggacgctgcgatggtgaaacgcgggctgattttgctcagttcggtgtatgcgtaatcaacgtcttccggctgggtgtacagtgcagaagcgtccatgtggctgttgtccacgccgtcttcttcaccaccggtgcaacccagttcgatttccagagtcatgccgattttggacatgcgctccaggtatttagagcagatttcgatgttctcttgcagagattcttcagacaggtcgatcatgtgagaagagaacagcggcttaccggtagctgcgaagtgtttttcacccgcgtccaacagaccgtcgatccacggcagcagtttcttcgcgcagtggtcagtgtgcaggataaccggaacaccataatgttcagccatctggtgaacgtgatgcgcaccagagatcgcgcccaggatagcagcaccctgcggaacgtcagatttcacgcctttaccagcgataaaggaagcaccaccgttggagaactgaacgataaccggcgctttaactttagcagcggtttccagtacggcgttgatggagtcagtaccgacgcagtttactgctggcagtgcgaagttgttttcttttgctacctggaaaactttctgtacgtcatcaccagtgattacgccaggttttacgaaatcaaaaatcttagacatgtctcttgtcctgtatcgtcgggccttatactcgtcatacttcaagttgcatgtgctgcgtctgcgttcgctcaccccagtcacttacttatgtaagctcctggggattcactctcttgtcgccttcctgcaactcgaattatttagagtatgaaaaattgcgtgctctaaaagcgcgctgaaacaagggcaggtttccctgccctgtgattttttacttcttagcgcgctcttcgagcatcgctactgcaggcagtactttaccttccacgaattcgaggaatgcgccgccgccagtggagatgtaggagattttgtcagcaatgccgaacaggtcgattgctgccagagtgtcgccgccgccagcgatggagaacgcttcgctgtctgcgatagcgttagccacgatttcagtacctttgcggaagttcgggaattcgaacacgccaaccggaccgttccacagaatggttttcgcattcttcaggatttcagccagttcctgagcggaagcatcaccgatatccaggatctgctcgtcagctttcacatcgttaacagatttcagggtagccggtgcagtttcagagaactcggttgctacgcgaacatcagacggaaccgggatgttgcaggtggtcagcagacgtttagcttcgtcaaccaggtcagcttcgtacagggatttacccacatcgtggccttgtgccgcgataaaggtgttagcgataccaccaccaacaatcagctggtcagcgattttagacagggagtccagaacggtcagtttggtagatactttagaaccaccaacgatagccaccatcgggcgagcaggttctttcagtgctttacccagcgcgtccagttcagctgccagcagcgggcctgcgcacgcaacgtcagcgaatttaccgataccgtgagtagaagcctgcgcgcggtgagcagtaccgaatgcgtccattacgaacacgtcacacagtgcagcgtattttttggacagggtttcgtcgtctttcttctcgcctttgttgaagcgaacgttttccagaacaaccagttcaccttcagcaacgtcaacgccgtcgaggtaatctttaaccagacgaaccgggttagacagtttgtctttcaggtagttaacaaccggcagcagagagaattcttcgttgtactcgccttcggtaggacgacccaggtgggaagttaccatcacttttgcgccttgtttcagggccagttcgatggtcggcagagaagcacggatacgcgcgtcgctggttactttcccgtcttttactggtacgttcagatccgcacggataaatacacgtttcccagcaagatccagatcggtcatcttaattacagacatggtgaatcctctcgttgattctaaaagttttgcagacgctgcttgcgtcttacctgaaagcaacagtagccatagctaacgtcgtgtcgagcattcggttagcaaagccccattcgttatcgcaccagaccaacgttttgatcaggtgtgcgccactgacccgggtttgggtgccatcgacaatggcactgtgcggatcgtggttaaaatctacagagaccaacggcaattccgtatagtcaactataccatgaaatgcaccttgtgctgctttttgcagcaacaggttgacttcattggcttttacaggtttcttcaccgtcacgcttaaatcgattgccgtcacatttatggttggcacacgtaccgcaatcgcttcaaagcgatcgttaaattgcggaaaaaatcgtgtgataccggcggccagtttagtatcgaccggaatgatgctctggctggctgcccgggtgcgacgcaggtcaggatggtatgcatcaataacctgttgatcgtgcatggcggagtgaattgtggtcacagtgccggactcaataccgtacgcatcatctaacaatttgatgacgggaattatgcaattcgtggtacaggaagcgttagaaacgatgcggtgttccgcacgaagttgatcctgattgacgccgtaaacaacggtcgcgtcgagatcgttactgccaggatgactaaagagcacttttttggccccggcggcaatatgcgcttcgccatgctcgcgggagccatatacgccggtgcagtcgaggactacatcaacgccaagttcacgccaggggaggctttgcagactacgttcatgcaatacgcggatggcgtcatcaccaacaaaaagttgatcgcgttcctgtcgtacttcccatgcaaaacggccatggctggtgtcatatttcaacaaatgcgccatgcccgcagcatccgccagttcgttgattgccaccacggtaatttccgcccggcgtccggattcatacaaagcacgaaccacattacgcccgatgcgaccgaagccatttatcgctacgcgtacggtcatagatctcctgcaaggttttccctgagcaaatttgccagacagagtaatccagcaaatcgtccggggaaaccttacctgtcgcaaactgcgactgattggttaattgtcgaacatttaatcgactgaaacgcttcagctaggataagcgaaacgtggaataaaaggaatgtttgtccagccgaagaagacatttatctgactcacatcacacttttatccccttttgtgggaagctttattccaggctggcgtaataataaccctacaataactggaataaattgtcagcttgtgaagtgataccggccttcttcagtcatctctactatcagattggcctgacggctattcatcagcacacgctcgacattggggccatcggtgcgggcataaaatgcttcggctacttgccgcgttaatcctcccgcaattttacgactaatcaagcgctcccgcagaatttgagcaggtgcatgaataaaaatagaaaaatcgcagaaagatgccaactccagccacttttcatcatccagtaacaaccagtttccttcgacgatgacgagtggtgcggtaacgtgcaacgcatcttcaacaggatcatgcttttgtcgatcgtactgcggccacgtacaatccccttccacgacctggcgcagattttccgtcagtttcgcaacgtcaaatgtctctggtgcgcctttgaaggggcgcaattgatgcgcatccagccagctattgtaatggtgaaaaccatccatcgggagcgtctgaatagcgggcagttccgggtcttgttgcgcgagatattcccagaaggtggttagggtacttttacccgtccccggcggagcgcaaagaaaaaccaccgtacgccgctgcggatttaccgtctgtaaggccgccaacatgtgcagcaacggtttatgtacattttcaatctcttcgttctggtactgtgcctgtatcttcagcccattcaccgttaattcaattttcacggcgttaattcctttaaggtggtcgttactgccagcgtcagcgccgttttgaccattccgctaaaacgcgcctcactccagacggagaaatcagcgaacttcatcgcttttaacgcgtcatagagcatcgcattgcgggttatgctattgacgttgctgataaaatcccaggtcatgtcatcggcaaatccgggcgtttcatcctgttcgttcaggtaatgccagaactgggaaaaatgcgtgatatcggcgtacaaccatttatccattttcccaacgcataaatcaaacgcagtgcaacatcaatatcgtcaagcgggccgctttgggcgagtaacggcttcactgcatattccacgatctcttcatcgttatcgacaaacaggctcggcagaaactggcgtatcccctggagcaaaatggtatgcgcagttttcataaaactaaataaattgtcctgtgcatccagttgctcaagcacatcatcttctgtcagcgtcgccattggtcttccgatagatcaccatcaatgcagggagtctattatattacacgtttggtccgcgccgccgatcagtaatgtctgcgtccgcaccccattcgccgtctgttggataccgttcaccagctcaccgcccgtcacgcccgtagcgctaaagaggatatcgttccccctcaccagttcatcgaggctgtacacacggttaacgtcaacgcccattgccttgcaacgcttgcgctcctgctctgcaatctgccgattttccgtgtaatcccctttagcctggcaaaagtcaatcagctcggcctgcatatccccgcctaatgctttaacggcacaggcagaaatcacgccttctggcgcaccgccgatggtgtacatcacatcgtaaggattatcctgccagcaggtcagcacgctggcggcgacatcgccatccggcagggcaaaaaccttcacgcccagctgtgttgcttcctcaatcgcggcactcaggcgcggtttatccagcgtaaccatgcgcagcttatccagcggtttgcctaacgctttcgccacgttgcgcaggttgtccgtcagaggcaaagacagatcaatcgcgcccgccgccagccgattaacaaccagctttttcatatacatatcgggcgcatgtaacaggctatctcgaggggcgaaagccatgaccgccagcgcattgctctgccccatcgccaccatccgcgtgccttcaatgggatcaaccgcgatatcgacttctggcccatcgcctttgcccacctcttcgccaatccacagcatcggcgcatggtcaatttctccttcgccgataaccactcgtccacgaaaagcgacgtcgtttaatgcctggcgcatcgcggtgaccgccaggccatcaattttatttttgtcgccacatccggtttgcggccaggcagccaacgctgcctgttccgtaacgcgaaataatggccacgccagggacatcattgcgcggcctccccgatatcaacgccaaattgtgccagcagatatttctcggcctgttcattccagatgccgtgcgtttcctcaaccagccgcgccaactctttaaacagcggatcggttttgcctttttcggcaaaatcggcaatggcagtgagcggcatggtcacgccgttataaatgagttttttaccgccagggatatccggcagattgagcacggtttctggcaccgcatccaggccaccgatatgggtcaccataaagctcggctgtaactgcccagtggcgctaagggcaatcgcctctttcatgtcgtccgtactaccgccagatgtaccgacgacgtgcgtgctgttgtaatggacgttgtagaaattaaacggcactttgaagtttttatccgtcggcccggcaaagaagttcagacagccatcttccgccagtaattcatcagccatctcaacgacagcaggcaccgccgcataaacaaaaatgtcatcgaacccggcatctcctgtcagcgcccgcagcatctggacaggatcgctcatccctttggtattcacatacaccagctcaatgcctttactggccgccagttccaccggcagcagcttctgtacctgcgccagacgtttgtcgtcgatatcgaccaccaccacccggctcggttgtatgccgccgttaatggcgtaatcgatagcgccaatgcccatcggacctgcacacgccagcagtgcaatattgccgccaggtttgacgcccatgcgatgctcataaacatattgcgtggtgtgataattggcatgataagcaccaataatgcagcacataggctctgccaggctcgccgcagcaaaataagagccgtgatacggtaatacgcagcccaaattaatggcgatttcgggaataatcatataagtggcattgccgccaaaatattcgtagctgtagcccgcactatatccgcttggtaaccccatcgccggttgcaatacaaaacgctggccttttttatatttgccagtgagatttttacccacttcgacaataaccccggcacattcatgcccggtaatgaccggatgattttctaaatcgtcgggtacgcgtttatgttcactaccgagtaacgccgctttccaggtgcttaaacagacgctgtcagaaattacactcaccagtaattcattatcggtaatttctggcagttcaaatacgcgcagacggacatcccgcttgccataaatagcagcaactttggttttcatttttacctctgtaatcagtgtttatgttcggcggttaattgattaaataaagtgtcgagttttggatcgccaatatagttattaatcaatatcagtggtttatccgtcacacgtttcacgcgcccttccagactggcatgagtaacgacgatatccgcatccgcaggcacgttttctatggcgtaatgttttacttcaattgccagccccgctttttccaggcgtttacggaaggtggtcgcgcccatcgcactggagcccatccccgcatcgcaaacaaaggcgatacgcttaaccctgcttaagctgaatgcaccctcttgtttcatcgccttaaccgcattggcactctgagcaaactcatcttcgctctccgtttccaccgttttttccatcttcagtatcaggctagtaatagcaaaggacaccagggtacctaccgtaacaccggcaattgtcgccaggaagctgcctttcggcgtcagtgccaggtaagcaaagatagaccccggacttgggccagccaccagaccaccgtccagtaagttaaacatccaggtgccagacataccgcccgcaatcatggcaataatggtcagcggcttcatcagcacatacgggaaatacagttcgtggatcccaccgaggaagtgaataatcatcgccccgggcgcagaacgtttactcatccctttaccaaacaaggtaaacgccagcagcagccccaggcccggacctgggttagaggccaccataaagaagatggatttaccgttaacgctagcctgttgcattcccagcggataatagacgccctgatcgatcgcattattgaggaaaagcactttcgccggttcattgatgacactcaacaatggcagataacccgcatgtaccagcgcctcaatacactctttgacgaaagtattggcaattaacaccgccgggccgataacttcaaaacccagcagacaaaggagcatccccgcgatacctaaactgaagttattgataaccatctcaaaaccggcaggtatgcgtttttccagtgccttatcgacatattttatgaccaacccaccgagcggccccatgatcatactgccaaggaacatcgggatctctgcgccaacgatcacaccaatagtacctattccgcccatgaccgccccgcgtttaccgccgaccagatgaccacctgtagaaccaatcatcacgggcaataaataggtaatcatcgggccgacaattttggcgaaatgttcgttaggcagccaaccggtgggaataaataacgcagtaataaaaccccaggcaataaaagcaccaatattggggatgaccattgcagtcaaaaagcccccaaaagcctggacctttgcacgagcagacttgttttccataatattatcctgtagaggagagagtaattatccgcggctgataatgtccgctaattgtttttcactacttgctgttaagagttgttcgagtatttcttcttcgcacagtaattcacttaacgcctgaatagcgccaatgtggctatcggcatcggcagcagagagtccgatgagtaatttaattggttcgtcattccccggaaaataaacaccttgttcaagtaatgtcaaagacatcccggttttaagcgccccacattccggtcgcgcatgaggcattgccacgcctggtgcgagaatataataagggccattgttaatggtggaatctttaattgcctgaatgtaattctcgctgatatagtttttatccagcaaacttaccatgctgaaatcgatagcttcctgccaatcttttgcactatgtataacactgatactactttctggaaaataatcactaagccgcataaattatccttattttatttttagggtaccgtccggcggtaaaaataaaatactcgtgcggtttaatgaaagcaattgagcagggaaaccggtgttttgaaaacagtgaattattaatttcttatataacattgagttatagatataacaacaaatgtcaatacgcatatcgtgatgcatattacataattgatatttattgcatataaatatttgtgatctacaacacgccttatctattgcttgtccgcaaacggacatatcaaggtaataaaaaaggtcgccgaagcgacctttttacccgaaatgctaattacagcagttcttttgctttcgcaacaacgttatcaacagtgaagccgaactcttcaaacagcagctctgccggagcagattcaccgaaggtggtcataccgacgatagcaccgttcaggccaacatacttgtaccagtagtcagcaatacccgcttctacagcaacgcgtgcagtaaccgctttcggcagtacggattcacggtaagcagcatcctgcttgtcaaatgcgtcggtagacggcatggacaccacgcgcgctttcacgccttcggcagtcagtttttcgtaggcagcaacagccagttcaacttcactaccggtagcgatgaaaatcagttccggctgaccggcgcagtctttcagcacataaccaccgcgcgcgatgtttgccagttgctcttcagttcgttcctgctgcgccaggttctgacgggagaggatcagtgcggtcgggccgtcctgacgctcaacaccgtatttccacgcgaccgcggattcaacctggtcacacggacgccatgtagacatgttcggggttacgcgcagagaagcgacctgctcaaccggctggtgagtcgggccgtcttcgcccagaccgatggagtcgtgggtgtaaaccatcacctgacgctgtctcatcagcgcagccatacgtacggcgttacgtgcgtattccacgaacatcaggaaggtggaggtgtacggcaggaagccaccgtgcagggagataccgttagcaatcgcggtcataccgaactcgcgaacaccgtagtggatgtagttacccgcagcatcttcgttgattgctttagaaccagaccacagggtcaggttagacggcgccaggtcagcagaaccgccgaggaattccggcaacagcggaccgaacgcttcgatagcattctgagacgctttacggctggcgattttcgccggattagcctgcagtttagcgatgaactctttcgctttagcgtcgaagtcagacggcatttcgcctttcatacggcgggtaaattcagcggcttcctgcggataagctttcgcgtaagcagcgaatttctcgttccatgcggattctttcgcctggcctgcttctttcgcatcccactgagcatagatttcagacgggatttcgaacggcgcatatttccagcccagttgttcgcgggtcagggcaatttcagcgtcgcccagcggcgcaccgtgggagtcgtgggtaccggctttgttcggggaaccgaaaccgatgatggttttgcacatcagcagggaaggtttgtcagtcactgcgcgcgcttcttctactgcgcgtttgatagatgccgcgtcatgaccgtcgatgtcgcgaataacgtgccagccgtaagcttcgaaacgcattgcggtgtcgtcggtgaaccagccttcaacgtgaccatcgatagaaataccgttgtcatcgtagaatgcaatcagtttacccagcttcagcgtacccgccagagagcaaacttcgtgggagatgccttccatcatgcagccgtcgcccatgaaggcgtaggtgtagtggtcgacaatgtcgtggcccggacggttaaactgcgccgccagcgttttttctgcaatcgccataccgactgcgttggcaataccctgacccagcggaccggtggtggtttccacaccagcggtgtaacccacttccgggtgacccggagttttagagtgcagctgacggaagtttttcagttcttccatcggcagatcgtaaccggtgaggtgcagcaggctgtagatcagcatggagccgtggccgttggacagcacgaagcggtcacggtcagcccaggacggattctgcgggttgtgtttcaggaaatcacgccacaggacttcggcaatgtcagccatacccataggggcacccgggtgaccggatttggctttctgtactgcgtccatgctcagcgcacgaatagcattggcaagctctttacgactggacattttgactccagatcggatgatgaagggcacgcccttaacgacttgacgacagcgcgttttgggctacgccggaaaatttgccaacaatttaccacaagccgcgcgtcatgtacatggaacatccttttgccgcttcagaaatctctggatcatgctcgcatgttgcgcaatctactcgcccgtccgctgcgcttttccttatactgagactgagcgtcgattcacctgcaaacggcgcatttttagaataatcctgaccttgtgcggaagagaaaacatgaaaattcgcgccttattggtagcaatgagcgtggcaacggtactgactggttgccagaatatggactccaacggactgctcagtagtggagcggaagcttttcaggcttacagtttgagtgatgcgcaggtgaaaaccctgagcgatcaggcatgtcaggagatggacagcaaggcgacgattgcgccagccaatagcgaatacgctaaacgtctgacaactattgccaatgcgctaggcaacaatatcaacggtcagccggtaaattacaaagtgtatatggcgaaggatgtgaacgcctttgcaatggctaacggctgtatccgcgtctatagcgggctgatggatatgatgacggataacgaagtcgaagcggtgatcggtcacgaaatggggcacgtggcgttaggccatgtgaaaaaaggaatgcaggtggcacttggtacaaatgccgtgcgagtagctgcggcctctgcgggcgggattgtcggaagtttatctcaaagtcaacttggtaatctgggcgagaaattagtcaatagccaattctcccagcgccaggaagcagaagccgatgattattcttacgatcttctgcgccaacgcggcatcagcccggcaggtcttgccaccagctttgaaaaactggcaaaactggaagaaggtcgccaaagcagtatgtttgacgaccatcctgcatccgccgaacgcgcccagcatattcgcgatcgcatgagcgcggatgggattaagtaaagcctggtggtgtcgaacgtaggtcagataaggcgttcacgccgcatctgacatgaatggcacatttgttaccttgtgcgcattgccggatgcgatgctggcgcatcttatccggcctacgggtgccgaacgtaggtcggataaggcgttcacgccgcatccgacattaatggcacgttttacccgtgcgcatcgcatctggtgcttactcgccctttttcgccgcctgaatatacagcatttccagcgccagcgttgccgctgccagagcagtgatttcgctctgatcgtatgccggagccacttccactacgtccatcccaacaatgttgagatctttcaggccgcgtaccagtttaatagcgcgatcggaggtcaggccgccaatcactggcgtaccggtgcctggtgcaaaagcaggatccaggcagtcgatatcaaaagtcaggtaaaccggcatatcacccacaatctgtttcacttgggcgataacgtcatccacgctgcgatcgttcacctggcaggcgtccagcacggtaaagccgttgtctttatcaaactcggtacgaataccaatctgcacggaatgattcgggtcgatcagaccttctttcggcgcggtatagaacatagtgccgtggtcaaattcacaaccgttcgcataggtatcggtgtgggcgtcaaagtgtaccagcgccattttgccgaaatgcttcgcatgagcacgcagcagcggcagcgtaacaaagtggtcaccaccgaaagagagcatacgcttaccggcagccagcagcttctcggcgtgcgcctgcagcttttcgctcatctcacgggcatcgccaaaggcatataccagatcgccgcagtccacgacgttcagacgctcacgcatgtcgaaattccacgggaagcggttgtgttcccaggccagattcgtgctaacctgacggatcgctgccggaccgtggcgaccacccgcacgaccagaagtggccatatcgaacggcacgccagtaatcacccagtctgcatcgctgtcatacggctggaagttcatcggcaggcgtaaaaaaccaaaggcattggaaaccagactgttatcgtattgatgacctaaggtgctcatggatggactcctattacaaagtcgatataaaaaaacccttccgcgtcgttaggcccgacgaggaagggttggatttgtcacaataaattgtggcggattatcaccgctaaattaagcggattcaagtaacacaggacttactcatcttcaagataagtataaccgtacaaacctgcctcgaactcttcaaggaactgttgttgcagttcagcatcaagatcggttttcttcacttgatcgcggaactgggttaacagcgttttcggatcgagctgtacatattgcagcatgtccgccacggtatcgccttcgtcagacagttctacttctacgctaccgtcagggaagacgaacacgtcaaccgcttcggtatcaccgaacaggttgtgcatgttgccgaggatctcctgatatgcgccgaccataaagaaaccgagcatcggcggattctctggatcgtactccggcattggcattgtcgtggcaataccgtcaccatcaatatagtggtcgatagcaccgtcagagtcacaggtaatatccagcagcacagcgcgacgttccggcacttgatccagcccttccagcggcagaaccgggaacaactggtcgatcccccatgcgtccggcatgctctggaacaggctgaagttgacgtacattttgtccgccatacgttcctgcagctcgtcgataatcggacgatgagcacggttttgcggatccagctgcttttgcacttcatggcacatgctcaaataaagctgctcagcccatgcacgttcttgcaggctaaagatgccggaagagtagccgatatgaatgtcgtgcagatccatctgactgtcgtgtaaccattcacgcagagaacggcgagttcccggttcgtgcatctcctgccaggtttcccacatgctttgcagcgcgcgcggcgcatcttctgcaggcgcggtcggcaccgtgtattcgttacgttccacgccgatgatattagacaccagcacggtgtgatgcgcagtcaccgcacgaccgctttcggtgattaccgtcggatgcggcagaccgttttcttcacacgcatcgccaatcgcccagataatgttgttggcgtattcattgaggccgtagttcacgctacagtcggactggctacgagtaccttcataatccacgcccagaccgccgccgacgtcgaagcactgaatattgacgcccagcttgtgcagttccacatagaaacgcgcggattcacgaacgcctgtcgcgatatcgcgaatattcgccatctggctaccgaggtggaagtgcagtagttgcaggctgtcgagacgcccggcttcacgcagggtttcaaccagttgcagtacctgagtcgcagccaggccgaacttgcttttttccccgccggaggactgccatttaccgctaccctggctagccagacgtgcacgcacgcccagacgaggaacgacattcagacgttctgcttcatccagcacaatggcgatttcactcatcttctcaatgaccagatagaccttgtgccccatcttctcgccaattaatgccaggcggatatattcgcggtctttataaccgttgcagacgatgacgctacgggtcatgccagcatgtgccagtactgccatcaactcggctttggaaccggcttccagacccagcggttcgccgctatgaatcagggactcaatcacgcggcggtgctggttaactttgatcggataaacaaggaagtaatcgccgttatagccgtaggattccctcgcacgtttgaacgcggcgttaatggaacgcaaacggtgctgcaggatctgtgggaaacagaacagtgcaggcagacgctggccctgtgcttcacgagttttcactaactgcgcgagatcgacgcgagcttccgggacgtccgggtccgggcacacgctaatgtggcccagctcgttaacgtcatagtagttattgccccaccaggcaatattgtaagtacgcagcatcttgctggcttcctgggagctcattgcaacctcctgcatggagcgtagtacaccgtgttcgcccgcactgctaggcaaacccatagacatgtcgtcagacatagcgaacctcaaattattttattaagtgtaaaacagttaacgactatcgcagcctggaactggcttaacaacccataagcacatggattttccagcagactatgctgacgctccaactgcgcaaccggtttctttttcataacattattaagcacataaccgaacgtaagtgtgaaagttcggcgaaaccacgagaaaactcttgtttttacaagagcgcccttgttcagtcctcagtaactgtaaccagctcttgaatcctgagaagcgccgagatgggtatagcaagcgcaggtatgcaaagcagagatgcagagtgcggggaacgaatcttcaccagaacggtgagacaggttaagcagcagacaacggttcattatttcgtaagtcctccacggccgcctgttaagacgaacccacaagccaaaactctgattagtacccggctggaagtggcaacacgaaagaaacgtcgtgtgctttttatttaagccgcgcgccgcgttttataccccacaatggcagaaaattgcaaaagataaatacgcagaatgccggcattgtcaggaaaaatttccagccacgtttttaacagaatgagacagctttcaaaaaaaagtggaaatagggtgaagaattgacctaaaatagccatccagatgttaatccatccataccgattaacactcagactgccagtgtttttaacctgcagagtcgtggtaggatccgctaccacagaaaatccacacaacagtttgagctaaccaaattctctttaggtgatattaaatatggcaaaacacctttttacgtccgagtccgtctctgaagggcatcctgacaaaattgctgaccaaatttctgatgccgttttagacgcgatcctcgaacaggatccgaaagcacgcgttgcttgcgaaacctacgtaaaaaccggcatggttttagttggcggcgaaatcaccaccagcgcctgggtagacatcgaagagatcacccgtaacaccgttcgcgaaattggctatgtgcattccgacatgggctttgacgctaactcctgtgcggttctgagcgctatcggcaaacagtctcctgacatcaaccagggcgttgaccgtgccgatccgctggaacagggcgcgggtgaccagggtctgatgtttggctacgcaactaatgaaaccgacgtgctgatgccagcacctatcacctatgcacaccgtctggtacagcgtcaggctgaagtgcgtaaaaacggcactctgccgtggctgcgcccggacgcgaaaagccaggtgacttttcagtatgacgacggcaaaatcgttggtatcgatgctgtcgtgctttccactcagcactctgaagagatcgaccagaaaagcctgcaagaagcggtaatggaagagatcatcaagccaattctgcccgctgaatggctgacttctgccaccaaattcttcatcaacccgaccggtcgtttcgttatcggtggcccaatgggtgactgcggtctgactggtcgtaaaattatcgttgatacctacggcggcatggcgcgtcacggtggcggtgcattctctggtaaagatccaagtaaagtggaccgttccgcagcctacgcagcacgttatgtcgcgaaaaacatcgttgctgctggcctggccgatcgttgtgaaattcaggtttcctacgcaatcggcgtggctgaaccgacctccatcatggtagaaactttcggtactgagaaagtgccttctgaacaactgaccctgctggtacgtgagttcttcgacctgcgcccatacggtctgattcagatgctggatctgctgcacccgatctacaaagaaaccgcagcatacggtcactttggtcgtgaacatttcccgtgggaaaaaaccgacaaagcgcagctgctgcgcgatgctgccggtctgaagtaatctttcttcacctgcgttcaaaggccagcctcgcgctggcctttttcttttggataggcgttcacgccgcatccggcaaaaaaaccgcccgcacaataacatcattcttcctgatcacgtttcaccgcagattatcatcacaactgaaaccgattacaccaaccacaacagacaaagatttgtaatattttcatattattattcggttttcacagttgttacatttcttttcagtaaagtcttaattgcagataacagcgtttaatctatgatgatataactcaattattttcatgcacttaaatcataactaagataaatgttagtgtaagcgattacactgatgtgatttgcttcacatctttttacgtcgtactcacctatcttaattcacaataaaaaataaccatattggagggcatcatgcctgacgctaaaaaacaggggcggagtaacaaggcaatgacgtttttcgtctgcttccttgccgctctggcgggattactctttggcctggatatcggtgtaattgctggcgcactgccgtttattgcagatgaattccagattactagccacacgcaagaatgggtcgtaagctccatgatgttcggtgcggcagtcggtgcggtgggcagcggctggctctcctttaaactcgggcgcaaaaagagcctgatgatcggcgcaattttgtttgttgccggtagcctgttctctgcggctgcgccaaacgttgaagtactgattctttcccgcgttctactggggctggcggtgggtgtggcctcttataccgcaccgctgtacctctctgaaattgcgccggaaaaaattcgtggcagtatgatcagcatgtatcagttgatgatcactatcgggatcctcggtgcttatctttctgataccgccttcagctacaccggtgcatggcgctggatgctgggtgtgattatcatcccggcaattttgctgctgattggtgtcttcttcctgccagacagcccacgttggtttgccgccaaacgccgttttgttgatgccgaacgcgtgctgctacgcctgcgtgacaccagcgcggaagcgaaacgcgaactggatgaaatccgtgaaagtttgcaggttaaacagagtggctgggcgctgtttaaagagaacagcaacttccgccgcgcggtgttccttggcgtactgttgcaggtaatgcagcaattcaccgggatgaacgtcatcatgtattacgcgccgaaaatcttcgaactggcgggttataccaacactaccgagcaaatgtgggggaccgtgattgtcggcctgaccaacgtacttgccacctttatcgcaatcggccttgttgaccgctggggacgtaaaccaacgctaacgctgggcttcctggtgatggctgctggcatgggcgtactcggtacaatgatgcatatcggtattcactctccgagcgcgcagtatttcgccatcgccatgctgctgatgtttattgtcggttttgccatgagtgccggtccgctgatttgggtactgtgctccgaaattcagccgctgaaaggccgcgattttggcatcacctgctccactgccaccaactggattgccaacatgatcgttggcgcaacgttcctgaccatgctcaacacgctgggtaacgccaacaccttctgggtgtatgcggctctgaacgtactgtttatcctgctgacattgtggctggtaccggaaaccaaacacgttagcctggaacatattgaacgtaatctgatgaaaggtcgtaaactgcgcgaaataggcgctcacgattaatctccccaagcttcctcccatcgcggaggaagccacctcttgcagtcatcttttcttcgctctatcctctgccgctatgaaaacatcccgtctccctatcgccatccaacaggccgttatgcgtcgcctgcgggaaaaactcgcccaggccaacctgaagctagggcgtaactacccggagccaaaactctcttacacccagcgcggaacctccgccggaacggcctggctggaaagctatgaaattcgcctcaatcccgttttgctgttggaaaacagtgaagcttttattgaagaagtggtaccgcacgaactggcacatttgctggtatggaaacatttcggccgcgtagcgccacatggcaaagagtggaagtggatgatggaaaacgtgctgggtgttcccgcccgtcgtacgcatcagttcgaactgcaatccgtgcgtcgcaacaccttcccctaccgctgcaagtgccaggagcatcagcttaccgtacgccgccataatcgcgtagttcgtggcgaggccgtctatcgctgtgttcactgcggtgaacagctggttgcgaaataaccatctgaactatcaggaactttcctgatttggctgattgcataccaaaacagctttcgctacgttgctggctcgttttaacacggagaagtgcctacactagcgggattctttttgttaacccctaccccacgcgtacaaccgcgtggggagacgacgcggatttttaactatgcgtatcccccgcatttatcatcctgaaccactgaccagccattctcacatcgcgctttgcgaagatgccgccaaccatatcgggcgcgtactgcgcatggggccggggcaggcgttgcaattgtttgacggtagcaaccaggtctttgacgccgaaattaccagcgccggcaaaaaaagcgtggaagtgaaggtgctggaaggccagatcgacgatcgcgaatctccgctgcatattcacctcggtcaggtgatgagccgtggtgaaaaaatggaatttactatccagaaaagcatcgaactcggtgtaagcctcattacgccacttttttctgagcgctgcggcgttaaactggatagtgaacgtctgaacaagaagcttcagcagtggcagaagattgcaattgctgcctgtgagcagtgtggtcgtaaccgggtgccggaaatccgtccagcgatggatctggaagcctggtgtgcagagcaggatgaaggactgaaactgaatcttcacccgcgcgccagtaacagcatcaatacgttgccgttaccggttgaacgcgtccgcctgctgattggcccggaaggcggtttaagcgcagatgaaattgccatgactgcccgctatcaatttactgatatcctgttgggacctcgcgttttgcgtacagagacaactgcgctcaccgccattaccgcgctacaagtacgatttggcgatttgggctaacggagaagaataatgatcaagctcggcatcgtgatggaccccatcgcaaacatcaacatcaagaaagattccagttttgctatgttgctggaagcacagcgtcgtggttacgaacttcactatatggagatgggcgatctgtatctgatcaatggtgaagcccgcgcccatacccgcacgctgaacgtgaagcagaactacgaagagtggtttagcttcgtcggtgaacaggatctgccgctggccgatctcgatgtgatcctgatgcgtaaagacccgccgtttgataccgagtttatctacgcgacctatattctggaacgtgccgaagagaaagggacgctgatcgttaacaagccgcagagcctgcgcgactgtaacgagaaactgtttaccgcctggttctctgacttaacgccagaaacgctggttacgcgcaataaagcgcagctaaaagcgttctgggagaaacacagcgacatcattcttaagccgctggacggtatgggcggcgcgagcattttccgcgtgaaagaaggcgatccaaacctcggcgtgattgccgaaaccctgactgagcatggcactcgctactgcatggcgcaaaattacctgccagccattaaagatggcgacaaacgcgtgctggtggtggatggcgagccggtaccgtactgcctggcgcgtattccgcaggggggcgaaacccgtggcaatctggctgccggtggtcgcggtgaacctcgtccgctgacggaaagtgactggaaaatcgcccgtcagatcgggccgacgctgaaagaaaaagggctgatttttgttggtctggatatcatcggcgaccgtctgactgaaattaacgtcaccagcccaacctgtattcgtgagattgaagcagagtttccggtgagcatcaccggaatgttaatggatgccatcgaagcacgtttacagcagcagtaacccaccttagcgagaaggatctcgttgagactctgagtgacagcgcccttctttccacgcatactgggcgctgttgcttttttgaaccaggaaacagaacctctgacaatgaatttacagcatcactttcttattgccatgcctgctctccaggatccgattttccgtcgttccgtggtctacatttgcgaacataataccaatggtgcaatggggatcatcgtcaacaagccgctggaaaatctcaaaattgaagggattctggaaaagctgaagatcacgccggagccgcgtgatgaaagtatccgtctggataaaccggttatgctcggcggtccgctggctgaagatcgcgggtttattttgcatactccgccctccaattttgcttccagcattcgcattagtgacaacacggtaatgaccacttcccgcgatgtgctggaaacgctcggcaccgataaacaaccgtctgacgtattggtggctctgggttatgcctcctgggagaaaggtcaactggaacaagaaattctcgataacgcgtggctaacggccccggcagatctgaatattctgttcaaaacgccgattgccgaccgctggcgcgaggcggcaaaactgattggtgtggatattctcaccatgcctggtgtggcaggacacgcctgatgagtggaaccttactcgccttcgacttcggcaccaaaagcattggcgtagcggtcggccaacgcattaccggcaccgctcgccctttgcctgcaattaaagcacaggacggtacgccggactggaacattatcgagcgtttactgaaagagtggcagccggacgaaatcatcgtcggtttgccgctgaatatggacggcaccgagcaaccattgactgccagagcgcgtaaatttgccaaccgtattcatggccgtttcggtgttgaagtaaagctccatgacgagcgtcttagcactgtggaagcccgttccggtctgtttgaacagggcggctatcgggcgctcaacaaaggcaaagttgactctgcctctgcggttattattctcgaaagctatttcgagcagggatattaaggcgatttaaacgcctggcggagtgtaaataatatcatcgcgtcttattgccggatgcggcgtgaacaccttatccagcacacatctggcagcggctataggtctgataagacgcgttagcgtcgcatcagacatttattgcctttgtaggcccgataagcttgcgcatcgggcatggcaacgtcacaaacgcccttcccccacccggtgctgataactctgctgaaacgttatcatccccacctgctgcccggtttgaataacatgcggtaactggtgggttttcccttcgcgaatcaaattccccaccgcgggtgtgttaatcagcaattcaaatagcgccacgcgtccttcctgtttatccacttccagcttttgactcagcactgcccgtaaactacctgccagttgattacgcacggggtctttttcctgcgccggaaaactatccaccagtcgctcaactgcctgcgcggcaccacgcgtatgtaatgttgccagcaccaaatgcccggtttctgccgccgtcagtgccagacggattgtctcgctgtcacgcagctctccgagcaaaatcacatcaggatcttcccgcaatgcggcccgcaatccgcttgcgaacgtcatacagtgcaaaccaatttcccgctgctggatcaaacatcgctggctggcatagagatattcaacaggatcttccagcgtcagaatatgcgcatcggcatgttgattgagatagccaaccatcgccgccagcgtggtagatttgccactccccgtcgcccccgtcaccagaatcaggccattctcgctcttgagtaattccggcaataccgttggtgcgccaagctgttcgagctgcgggcagtggctaggtaacagccgtaacgccaggctaatgccatgccgttgcgcgaatgcgctgccacgcaatcgctggttttccgccaggctcacggcaaaatccagctgaccattctccagcaatattgcccgctgatcgtcatccagccactcccgcagtagctcttcgacgtccggcgtatcaaacggcgcagcttccattctgccgcgaatgcgccatcgtgcgggccaggcgctgcacaggtgtagatcgctgacgttatgctttacactaagggccacaatttcttccatattcatactaagatcctcggaaaatgaacgatattgcgcataacctggcacaggtccgggacaaaatcagtgcggctgcaacgcgttgcggccgttctccagaagaaattacgctgcttgcagtcagtaaaacaaaacctgcgagcgccatcgcagaagccattgatgccgggcagcgtcaatttggtgaaaactacgttcaggaaggggtagataaaattcgccactttcaggaactgggcgtaacaggattagaatggcattttattggcccgttgcagtctaataaaagccgcctggtggcagagcatttcgactggtgtcataccatcgaccgtttgcgcatcgctacccgtctcaacgaccagcgcccggcagaacttccccctcttaacgttctgattcaaattaacattagtgatgaaaacagtaagtccgggattcaactggctgaactggacgagctggcagctgcggtcgctgaactaccgcgtttacgtctgcgcgggttgatggcaatccctgcgcctgagagtgaatatgtaaggcagtttgaagttgcacgccaaatggctgtagcatttgccggactgaaaacgcgctacccgcatatcgacacgctctctctgggaatgagcgacgatatggaagccgccattgcggcaggtagcacgatggttcgtatcggcactgcaatttttggtgcgcgtgattactctaaaaaataaggaattaaaggaacgccatgaatacgttgactttcctgcttagtacggtcattgagctgtataccatggtgctgttattacgcatctggatgcagtgggctcattgtgatttttacaaccccttcagtcagtttgtagtgaaggtaacgcagccaattatcgggccactgcgccgcgttattccggcaatggggccaattgacagcgccagcctgctggttgcctatattctcagttttatcaaagccatcgtgctgtttaaagtggtgaccttcctgccaatcatctggattgccggtttactgattctgctgaaaaccatcggcctgctgattttctgggtcctgctggtgatggcgattatgagctgggtaagccaggggcgtagcccgattgaatacgtgctgattcagctggccgatccgctgctgcgcccgattcgccgcctgctaccggcaatgggtgggattgatttcagcccgatgatcctcgttctgctgctgtatgtcatcaatatgggtgtcgcagaagtattacaggcaaccggaaatatgctgctgccagggctgtggatggcgttatgaatgccgtaacagttaatgatgacggtctggttttacggctctatattcagccgaaagccagccgtgattctattgtcggtttacatggcgacgaagttaaagtcgccattaccgcgccgccggttgacggccaggccaacagtcatctggtgaagtttctcggtaagcaattccgggttgccaaaagccaggtggtgattgaaaaaggcgaacttggccgccacaaacaaattaaaatcattaatccgcaacaaatcccgccagaaatcgcggcgttaattaattaagtatcctatgcaaaaagttgtcctcgcaaccggcaatgtcggtaaagtgcgtgagctggcgagcctgcttagcgacttcggtcttgatatcgtggcccaaacagacctcggcgttgattccgctgaagaaaccggcctgacctttatcgaaaacgcgattctgaaagcgcgccatgcggcaaaagtgaccgctttaccggcaattgccgacgactctggtctggcggtagatgtgcttggcggcgcgccgggcatttactccgcgcgttattccggtgaagacgcgaccgatcaaaagaatctgcaaaaactgctggaaacaatgaaagacgtaccggacgaccaacgtcaggcgcgtttccactgcgtgctggtatatctgcgtcacgcggaagatcccactccgctggtatgccacggtagctggccgggcgtgattactcgtgaaccagcgggcactggtggctttggttatgatccaatcttcttcgtaccttccgaagggaaaaccgccgccgaactgacccgcgaagaaaagagcgccatttcccaccgtggtcaggcgttgaaactgctgctggacgctttacgtaatggttaaattacctccgctgagtctctacattcacatcccgtggtgcgtgcagaaatgcccgtactgcgatttcaactctcacgcgttgaaaggagaagtgccgcacgacgattatgttcagcatctgcttaacgatctggacaacgatgtggcttacgctcagggccgtgaagtaaagacaatctttattggcggtggtacgccgagcctgctttccggcccggcgatgcaaacgctgctggacggcgtgcgtgcgcgtttgccgctggcagcggatgcagaaattactatggaagcgaaccctggcacggtagaagccgatcgctttgtcgattatcagcgtgctggtgtgaaccgcatctctattggtgtgcagagttttagcgaagaaaagctgaaacgacttgggcgtattcatggcccgcaagaagcgaaacgcgcggcgaagctggcgagcggtttagggttacgtagctttaaccttgatttgatgcatgggctgccggatcaaagtctggaagaggcgcttggcgatctacgccaggccattgaactgaatccgccgcatctttcctggtatcaactgaccatcgaacccaatacgctgtttggtagccgaccaccggtgctgccggacgatgacgcgttgtgggatatattcgaacaggggcatcagttattaaccgcagcgggttatcagcaatatgaaacttccgcttacgccaaacccggttatcagtgccagcacaatctcaactactggcgctttggtgactacatcggtattggctgcggcgcacacggcaaagtgaccttcccggatgggcgcattctgcgtaccaccaaaacgcgtcatccgcgtggttttatgcaaggaaggtatctggaaagccagcgtgatgtcgaagccacagataagccgtttgagttctttatgaatcgcttccgtctgctggaggccgcgccgcgcgtggagtttattgcgtataccgggctttgcgaagatgtgattcgcccacagttagacgaggcgattgcccagggttatctcaccgaatgtgcggattactggcagataacggaacatgggaagctgtttttaaatagcctgctggagctttttctggctgagtaaacttgtattgccggatgcggcgtgaacgccttatccagccgacatgtggcagcggttgtaggtctgataagacgcgcaagcgtcgcatcagacgttgattgccggatgcggggtcaacgccgcatcctgctacaaatcgtgcactatatcaaacttacttaatcaccccattgcgccgcagttgttcggtatcttttttccagcgttcattagcttggttgatatcgtcaattttcatcaaaatcgcgacttttttactgtttatttcactaactttcatcgttaacggatattgccctttttcgagcgttacccagtcatcctgcaatttacggctaagtttttgactttgcagaaaagtctgtcgccgttgttcgttgatatcgaaatctcgtttctgctgaatcggcacttcataacactcttcactctgtttatgacatgccgcaatcgccggttgataaacctctttgtcatatttaaccgcgaacgcctcgctatcgttctgtttattaaactcatcacgctgttggtgaatttttttaaaggcgtcttcgcgggtcatttgcttaccgtttgcatcttttccccaatatgcatccgctgctttctgcgccgccaccatttgcttatcaagcgctttcacttccttttccagcgcaggaatgctgttcttctgggtattcaacgcagattcaagctgactaaagcgataattgaaatcttcgctattcacgatcagatatttattattcgttttgatatcgtcgaccacccgcccacgatcgctggctgccgcctgaaaagagtaaaagttcacgctccagccagacgcgggcgttcctttactggttaacatcgcgctgaattttaccggtttatctttcgtccaggtctgttcgagcagttcgtaatctgccaactgaccgacccaggtatagagatcgtcactggaagagacatcgccttccgcactccaggtggcctgattacccttagcatcaagattttttaaggtgatagcatcaagcttgagaatgccgtgatactgctttttgaattgatcttttaagatattttcagttggcggttcgccatctgcccaggcattaccagtcatcaacataagcagtgccgtgccaacaatccattgctttttcacccgaaaaacctcacgcggaataatttattccggtgattatcattagggtaattaaaattggcaatggacgtgagtctgaagtgaaaaagccccggcacgataccggggcgaggcgattagtactgattgaagatctgctggatctgctgcggatctttggtttgcgtcagagccagttgcagcagaacgcgcgctttttgcgggttcagcgtgccagaggcgacgaagccgtatttcgcatcatccacttcggcatcctgagtggtagcgcccgtcggtacgcgggaagaacgcacgactgcagtaccggttttcgcggcggtcgccagcgtgtcgaacacagatttatacaggttgccgttacccacaccagcgctaacgatgccatcatagcccgcatctaccagtgctttagccggaagatcggatgcgttagcgtagttataaacaatgccgactttcggcagttcattcagcttagagacatcgaatggcgtgtcgctggtatgcttacgtgccggggtacgctggtagtcaatcttaccgttgtgaatgtaacccagaggaccgtagttaacagacttgaaggtcgctacgtcggtggtgttggttttggtgacgtcacggccatcaagcacggtgtcattcatcactaccagcacgccacggttggcggaggctttatcagctgcggtcactaccgcgttatacaggttgaatggaccgtctgcgctcatagacgtggacggacgcattgcgccgaccatcaccaccggtttgtcgcatttcaccgtcaggtcgaggaagtaagcagtttcttccatcgtgtcggtaccgtgggtaatgacgaagccgtcggtcttatcgcagtcggtgttaatttttttcgccagtgtcagccagacattatcgttcatgtcctgggagccgatattcactacctgctcgcctttaacgttcgcaatgtcttttagttgcggcaccgcattaaccagattttctacgccaactttacccactgtgtagttagatttggttgcggagtcaccaccaccggcaatggtcccgccggttgctaaaatggtgatattgggtaatgccaatgctgcaccactaaaacccataaccagtgcggcaagtgccgtctttttgaaaaactccatttcattcctccagttacgtgaacgctacgcattatcccttagctctgtatgggaaatttgacgttaaacaatttacaacgtgaatatattttggagatctacaaagttagaggcaggtaacaaaacgaagaattaaacggcataaaaaagtattatgccgtcttaaaatagaggattattttaaattcccgaccagggctttgcggctatcttccagagtcacaacgcggctacaaacatctttgccaaactgctggaaatctttttcctgctttttccactcggtttggatactggattgcagcccccccaggcttcccagcacattctgtaatgggttaccgccgctttttcagcaccgctttcgcgcccatttcattaatgctgtcctgtaaaattccacccattgcctgattcactaattgctggccttcggcgcgaacctgatcaatggctttatagtgaaacgtcaggccatcgctgcgcgtttcaataatgcggttcatctgctctttcagctgcgcatcaagtttggtcagacggctgcgcattttgctgctttcgcccatctcctgaacgataattttatccagagcaatacgggctttctcgacgcggcttttcgcgccttcatcaatccacggcagcgtgctgcgtagttcagcctgataatccttcgcctgctcgcgctgggcggcattcagggaatattgcttaccgttatacatcacgttgccgtctggcgtgatcaccagattgccgttttcgcccttcacctgcacggtttgcgggctgacaatcacatcgtcacgcggcgtgacgctgcactggtagtcggcgtgagcggtcattgccgtcacactaagtgctgccgccagcagcattttgcgcatcatagtcttccctcaagaaaaaatcaggccagcatttgctggccccagattgataacaaagtacgcgttttccatgccggatgcggcgtaaacaccttatcccgcctactcgatcgtgcatctttccaggcctgataagcgtagcgcatcaggcagttttgcatttgtcatcgcccgtatgctttcttagtcccaccaaacgtcgaaaagttcgctggtgcgtacctcatccagtttgcgctcttccagccacttacgcacaatcgcctgatgttcttcggtgcatttgccgatttcctgcatgcagatcagaccttcccaggccagataaccgctgccgtcaaaggccagtttgttcggttcgataacctcgttaataaaatcatcaacggttttatcaatctgttcttcgcttgtaccttccgggaatcgccatgccacgctaaatcctaattcctggaattcgtcgatgtgcatttttttacgcagacgacggctacggttctttgccattatttcaccctctcgaacattaagtcccatactccgtgaccaagacgatgaccacgttgttcaaatttcgtcaccggacgacttgccggacgcggtacgtaatcattgctctcactcaggtttttataaccgtcaatagaagacatcacttcaagcatatgttccgcataaggttcccagtcggtcgccatatggaatacgccccccagctgcagtttgctttttaccagttcggcaaacggcacctgaacgatacggcgtttattatggcgcgctttgtgccacgggtcagggaaaaagagctgcaccatgcgcaaactattgtcaggaatcattttatgcagcacttcaaccgcatcgtgacacatcacgcgcaggttgcttaaaccttcttcatgcgcagaagccaggcacgcaccaacgcccggactatgcacttcaatgccgaggaagtcctgctcagggcgatctttagccattgccaccaggctcgcccccatgccaaaaccaatctcaagcgtcaccggcgcttcacggccaaaaagcgcggggaaatccagcatatcttcgctgaactcaacgcccatcaccggccagtagttttccagcgcatgttcctggcctttggtcagtcgcccctggcggcgcacaaaactacggatacggcgcagtgggcggccgttttcatcaaattccggactaatgacgtcgtttttcataaaggtttagtcgcttgtgaaagtgttctgaaaacgggcattatccaaagttagttgccggatgcaagcatgataaggccgtggctgcggaaagttccggtttacaccctgccgtcgctgtgctgcaatcttgcccccaacaacagtgaattcggtgaccatgcaagcgagccaatttagtgcccaggttctggactggtacgataaatacgggcgaaaaactctgccctggcaaattgacaagacgccctacaaagtatggctcagtgaagtgatgttgcaacaaactcaggttgcgaccgttatcccctattttgaacgctttatggcgcgcttcccgacggtgaccgatctcgccaatgcgccgctcgacgaagttctccacttgtggaccgggcttggctattacgcccgcgcgcgcaatctgcataaagcggcacaacaagtggcgaccttacacggcggtaaattcccggaaacctttgaggaagttgcagcactgccgggcgtcgggcgttccaccgcaggcgcgattctcagcctttctctgggtaagcactttccgattctcgacggtaacgtcaaacgcgtgctggcgcgctgctatgctgtaagcggctggcctgggaaaaaagaggtcgagaataaattatggagtttgagcgagcaggtgacgcccgcggttggcgtggaacggtttaatcaggcgatgatggatttgggtgcgatgatttgtacgcgcagcaaaccgaaatgtagcctctgtccgctacaaaacggatgtattgccgccgccaacaatagctgggcgctttatccgggcaaaaaaccgaaacagacgctgccggagcgcaccggctactttttgctattacagcacgaagatgaagtattgctggcgcagcgtccgccgagcggattgtggggcggtttatactgtttcccgcagtttgccgacgaagaaagtttgcggcagtggctggcgcaacggcagattgctgccgataacctgacgcaactgaccgcgtttcggcataccttcagccatttccacttagatattgtgcctatgtggcttcccgtgagcagtttcaccggctgcatggatgaaggcaatgcgctctggtataacttagcgcaaccgccgagtgttggcctagcggctcccgtggagcgtttgttacagcagttacgcactggcgcgccggtttaacgcgtgagtcgataaagaggatgatttatgagcagaacgattttttgtactttcctgcaacgtgaagcagaaggtcaggattttcagctgtaccccggcgagctgggaaaacgcatctataacgagatctccaaagaagcctgggcgcagtggcagcacaagcaaaccatgctgattaatgaaaagaaactcaacatgatgaatgccgagcaccgcaagctgcttgagcaggagatggtcaacttcctgttcgagggtaaagaggtgcatatcgagggctatacgccggaagataaaaaataaaaacagtgccggagcacgcctccggcaacttgcataaaaacaaacacaacacgcacccggaatgatgaaaaaatatctcgcgctggctttgattgcgccgttgctcatctcctgtagcacgaccaaaaaaggcgatacctataacgaagcctgggtcaaagataccaacggttttgatattctgatggggcaatttgcccacaatattgagaacatctggggcttcaaagaggtggtgatcgctggtcctaaggactacgtgaaatacaccgatcaatatcagacccgcagccacatcaacttcgatgacggtacgattactatcgaaaccatcgccgggacagaacctgccgcgcatttgcgccgggcaattatcaaaacgttattgatgggtgacgatccgagtagcgtcgatctctattccgacgttgatgatattacgattagcaaagaacctttcctttacggtcaggtggtggacaacaccgggcagccgattcgctgggaaggtcgcgcaagcaacttcgcggattatctgctgaaaaaccgtctgaagagccgcagcaacgggctgcgtatcatctacagcgtcaccattaacatggtgccgaaccaccttgataaacgtgcgcacaaatatctcggcatggtccgccaggcgagtcggaaatatggcgttgatgagagcctgattctggcaattatgcagaccgaatcttcctttaacccgtatgcggtcagccgttccgatgcgctgggattaatgcaggtggtacaacatactgccgggaaagatgtgttccgcagccaggggaaatccggcacgccgagccgcagtttcttgtttgatcctgccagcaatattgataccggcaccgcgtatctggcgatgctgaacaatgtttatctcggcggaattgataacccaacaagccggcgttatgccgtcatcaccgcctataacggcggcgcaggcagcgtgctgcgagtctttagcaatgataagattcaggctgccaatattattaacaccatgacgccgggcgatgtttatcagacgctgacgacccgccatccctctgcggaatctcgccgttatctttataaagtgaataccgcgcaaaaatcctaccgccgccgataattccattaaccgcccctgacgatgctcaggggcaaaaatgttatccacatcacaatttcgttttgcaaattgggaatgtttgcaattatttgccacaggtaacaaaaaaccagtccgcgaagttgatagaatcccatcatctcgcacggtcaaatgtgctttttcaaacactcatccgcatcacgatgtgaggaaattaacatgaatcttaagctgcagctgaaaatcctctcttttctgcagttctgtctgtggggaagttggctgacgaccctcggctcctatatgtttgttaccctgaagtttgacggtgcttctattggcgcagtttatagcagtctgggtatcgcagcggtctttatgcctgcgctgctggggattgtggccgacaaatggttaagtgcgaaatgggtatatgccatttgccacaccattggcgctatcacgctgttcatggcggcacaggtcacgacaccggaagcgatgttccttgtgatattgattaacagctttgcttatatgccaacgcttgggttaatcaacaccatctcttactatcgcctgcaaaatgccgggatggatatcgttactgacttcccgccaatccgtatctggggcaccatcggctttatcatggcaatgtgggtggtgagcctgtctggcttcgaattaagccacatgcagctgtatattggcgcagcactttccgccattctggttctgtttaccctgactctgccgcatattccggttgctaaacagcaagcgaatcagagctggacaaccctgctgggcctcgatgcattcgcgctgtttaaaaacaagcgtatggcaatcttctttatcttcagtatgctgctgggcgcggaactgcagattaccaacatgttcggtaataccttcctgcacagcttcgacaaagatccgatgtttgccagcagctttattgtgcagcatgcgagtatcatcatgagcattagccagatctctgaaaccctgttcattctgaccatcccgttcttcttaagccgctacggtattaagaacgtaatgatgatcagtattgtggcgtggatcctgcgttttgcgctgtttgcttacggcgacccgactccgttcggtactgtactgctggtactgagcatgatcgtttacggttgcgcattcgacttcttcaacatctctggtagcgtgtttgtcgaaaaagaagttagcccggcaattcgcgccagtgcacaagggatgttcctgatgatgactaacggcttcggctgtatcctcggcggcatcgtgagcggtaaagttgttgagatgtacacccaaaacggcattaccgactggcagaccgtatggttgattttcgctggttactccgtggttctggccttcgcgttcatggcgatgttcaaatataaacacgttcgtgtcccgacaggcacacagacggttagccactaattacgcaaagaaaaacgggtcgccagaaggtgacccgttttttttattcttacttcaacacataaccgtacaaccgtttcacgccatccgcatcggtttcgctataaacaccttgcagctccgggctaaatcccggcaacaaattcaccccttcttccagtgcaaggaaataacgttgaaccgccccaccccagacttccccgggtaccacgcaaagcacgccaggtggataaggcaacgccccttctgccgcaattcgcccttcggcatcacgaatccgcaccaactccacgtcaccgcgaatataagcgctatgcgcatcctgggggttcatcaccacactcgggaaactctgctggcggaacatcgctttttgtaggtctttgacgtcgaaactgacatacagatcgtgcatctcctgacacaactggcgcagggtgtagtcgcgatagcgcaccggatacttgttataaacgctcggcaacacctcaaccagcgggctgtcatcctcaatatgctgttcaaattgcgccagcatcgccaccagttgtgccagcttctcgtggctttccgccggagttaataaaaacagaatggagttgagatcgcacttctccggcacaatgccgttctcacgcagatagtgcgccagaatcgtcgccggaacgccaaagtcgctatattcgccggtttcggcatcgatacctggtgtagtgagtaacagcttgcacggatcaacaaaatactgatccgcggcatatccttcaaagccgtgccacttcgcccccggctcaaaactgaaaaaacggcggtcgctggctaacacacttgtcggataatcctgccacaatttgccatcaacaacgggcgggataaacgggcggaacagcttacagcgcgcaagaatagccttgcgcgcttcaatccctatctcaacacactcagcccacagccgacgcccactctccccttcatgaattttggcgttaacatccagtgcagcaaacagcggatagaaagggctggtagaagcatggagcataaaggcgttattcaaccgcttatgcgggcaaaaacgcgcctgtccgcggatatggttatcttttttatggatctggctcgtctgactgaatcccgcctgctgtttgtgcacgctctgagtcacaaagatccccggatcgttttcgttaagttctaacagcagcgggctgctatccgccatcatcgggataaattgttcataaccgacccacgcggaatcaaacagaatgtaatcacacagatgcccaacggtatcgatcacctgacgggcgttatagacagtgccgtcataggttcccagctgaataatcgccaggcgatacgggcgcggcaggtcggctttttctggcgcaacgtcgcgaatttgctggcgcagatactcttcattaaaacagtgcgcatcaataccgccaatgaaaccaaacgggttgcgactagcttccagatagaccggcgtcgcccccgcctgaatcagcgcgccgtgatgattgctcttatggttgttacggtcgaagagcaccagatcgccacgcgttaacagcgcattcgtcaccactttattcgctgcgcttgtgccgttcagcacaaaataggttttatcggcatgaaagactttggctgcgaatttctgcgcatctttcgcgcttccttcatgaataagcagatcgcccaattttacgtcagcgttacacatatcggcgcgaaagacgttctcaccaaagaaatcgtaaaaatggcgtccggcaggatgctttttaaaaaacgcaccatgttgatgtccagggcaagcaaaggtgctgttgcccatctcaacgtactgcgtcagcgtgtcataaaacggtggcagcaaattctcttcatactgacaggctgcggattccagctccagccactgctgctcgttgccgttgattaccgccgtaacgcccgcaggtaattcaacagcatgttcggaatacaaaaacaccggtagatgaaaaccggtgcgcttaagcaacgcaagaatgccactgcgactatccgcagcggtaatgacgactgccgcgacgtccgtaaaatcagtatctcccaacgccaccacgcgacgatgagaagaaagtcgggataccagttcactactggcggcaatattcatacttttcataagcgcaaacccgtttcggggaagtaagaataccggacaaggtggaaaaccctgccccatgagatatgggtcaaactggtcaccagctccgaccgccagacatcagtaaaagcagaaacgctctgattttactgttgtcctgcagtgagcgtgcgttaacttcaccgcatgagcagtaacatagaaagggaaacgtttcgcgcgaaacggcgataagcgagagaatgtaaggagatggcgtgcatcgggcaaactccgtacagagaggagaaaattcgcgcaatcatggcacctttcgctaaagcgtgcaagccaggactttgcgaacaaacaagccatcgacggcaccaaacggtcataataagaaaatcaaacaatacagctaacaggaactcttgtggtcatcggcccttttatcaacgctagtgcagtcttactgggtggcgttctcggcgcactgctcagccaacgcttaccggaacgtatccgcgtctccatgacaagtatttttggtctggcaagcctggggattggtattttactggtggtgaaatgtgccaaccttccagcgatggttttagctacgctacttggcgctctaattggcgaaatttgtttgctggagaaaggtgtcaatacagcagtcgccaaagcacaaaatctgtttcgtcacagtcgtaagaagccagcgcatgaatcttttattcagaattatgtcgcgattattgtcctgttttgcgccagcggcaccgggatcttcggggcgatgaacgaagggatgaccggcgatccgagtattttaatcgccaagagttttcttgatttctttacggcgatgatcttcgcctgcagcctgggtattgcggtaagcgtgattagtatcccattactgatcatccagttaacgctggcgtgggctgccgcgctgattttaccgctgaccacaccgagcatgatggcagacttcagcgccgtaggcggtttattgctgctggcaaccggattacgcatctgtggcattaaaatgttcccggtggtcaacatgcttccagcactccttctggcaatgccgctttccgccgcctggaccgcctggtttgcctgacaatgcgtgcaatatcggcaaagtgatgatagattgtgcagtctgcagtaaattgaagaaatttgattgacgagacgaggcgaatcaggtttaatgcgccccgttgcccggatagctcagtcggtagagcaggggattgaaaatccccgtgtccttggttcgattccgagtccgggcaccactaattcttaagaacccgcccacaaggcgggtttttgcttttggatctgacaataaccttcacgaaaaaaattagcttataaagtctgggggaattactctcgccacgttaacgagagtaattttattgatattaatctcctgatactttacccccgtccaaactccagccgctgcacattcaccatcccaggcttctcagcagcactgacatcaatttgtgtcacccgcagcgcatagaacgccattttgaatttacgaacggacgcattatcagtgactttaacggcatgggcaaagtgaaatatcattttttaacgataaaaagagtgttatttcttgtgtatcagacaataagcattcattcaaaacctttagaaataatcaaaacacaggtattccactggttaatatattcacatatgaaatgaataaatattggaatatataaatattgaatattttgattaatccccgtactgattattcttcataatcagtacggggttgctacaacatgtattactttttcaccacaattaacggttcaatatcactctcttttttgatgaccagactttcatcaccgcgcaaacacgtcccaccgtagttgccgccaacggtgaaggtacatacctgaatgtatttaccgtccactttcggcaaacaccacagttgctgatagatgtttttctgctcggcaaatttaccgctggttttgtccagcacctcttcatgatggctgacgaggtcgatattgctgccacagcgaccggcgatcggtttcactgcgtaacctgttttcaccagttcatcattaacagtgaaatcggtatccagcaggtaacgatggtgcgggaacaggctccagaggatcggcagaatcgctttgttgccggggatcaccgtccacagcggctcaaagaccagcacttccgggcgcagcaatacgtcgataagacgcacttcgttttgcggatgaccggtacggattggcaccgcagcaaactcacggtcgctaacttcacgaatctgatcaaacgcggtttcccacgcccaggttttccacacgcagttaaccagtcgcccttccccatcaatcagttgcccggcagcatcccagcccagttcatccaatccacgcaagatacgcgtttcaaagcccgcctggtgcagcgcctgctccataaactgcgcgtgatagttttcctcgatatctttgtcctgcatgatatggacaaacggacgtgcacgactgtgtttccaggcaccagccaattcgttaatcagcccttccgccggattgaagccgttgcctttatagccctgctccgcccaacgttcgaggatcaagcccgcttcggtatgacaggaggcggagtcggcgttgtactcgtaaaccttcaggccacgctcatccatgcagaaatccatacgaccagtgatcatatggtgacggcgacgctgccaggagagacgcaaacgtggccagaggattttcgggatgtcgaacagcgccagcaggttgtcatctttcagcaccttgtcggttgcgtgaagatacatcaggtgcagctcgttggtggctttaattagctcctgctcggcactctcggtaatggtgtagtaatgataaggatcctgattgatcacctgaccgttggcctgcacataggcgttttgcagcggatctttttcatccagccatttaccgtcaaactggcctttgttttccaggcgcgctccgctgattttcagcagctcgcctgcaatttccggctgcggtaagctgtattcagtatcttccgtctggatcatccagcccagaatggtggtgtcatcaaaagtgtctttcagggtatagcagccgttttcgaccaccatctccagctcgcgcgtccactgttgcccttgcggcaacggggaatgaatcacgttctgttccgcaatacggactttgttgccatgcaattgggtaatgatggcgacatggccagtgtctttaaattcaccgcctttatcccagataagaagcgcacccgcgaccggcgcacgcgggctgccgttaggaaatgcctgcaatggcaggatgttgtcattaaccacttctcgcaggaagcgcaggctgaaaatctcccacgccatacccacgtcagtaaagaccacaccgtaattcagaaagagaaaacggcgagcaaattcaacgcattgccacttgtggcccatatattcgtcgtcgatatagctacggaatacggcgtcatcttcgtattcctgcggatcgagagaactgtaatcactagagtagattgctaccccacctggggcgtagcccaataatgtcccgaacggggcatcctggctggtcgttcctttgctcatcactttacctttaacaatacaacctaagcagttggcgtaattgttgtgctctgattacctgctcagcgacattaaccggacagaggtcagactaatcatacacctcatcgcagcggctggcgcaaagggttaaaaaattcacattctgtacagcaagtgacctgctacactgcttcaacactaccactcagaaggcaactcactatgacagacaatacttatcagcccgcgaaagtctggacgtgggataaatccgctggcggcgcgttcgccaatatcaatcgcccggtttctggtccgacgcatgaaaaaacgctgcccgttggcaaacacccattgcaactttatagcctgggaacgccgaacggtcagaaagtaacgattatgcttgaggagctgctggcgctgggcgttactggtgcagagtacgacgcctggctgattcgtattggcgatggcgatcaattctccagcggctttgtcgaagtgaacccaaacagcaagatcccggcgctgcgcgatcatacgcataatccgccgatccgcgtgtttgaatctggtagcatcctgctttatctggcggagaaatttggctacttcctgccgcaggatttggcaaagcgtactgaaacgatgaactggctgttctggttacagggcgcggcaccgttcctcggcggtggttttggtcacttttaccattacgcaccggtaaagattgagtacgccatcaaccgctttaccatggaagccaaacgtctgctcgacgtgctggataagcaactggcgcagcataagtttgttgcgggcgatgagtacaccattgcggatatggcgatttggccgtggtttggcaacgtggtgttaggtggtgtgtatgatgccgctgagtttcttgatgcgggcagttataagcatgtacaacgctgggcgaaagaagtaggcgaacgtccggcggtgaaacgtgggcgtattgttaaccgcaccaacggaccgctgaatgagcagttgcatgagcgccatgacgccagtgatttcgagacgaatacggaagataagcgtcaggggtaagggttggtgttcgtcgcagcaagccatccaggccggataaggcgttcacgccgcatccggcaatcgtgcacaatgcctgatgcgacgctgccgcgtcttatcaggcctacgaaagctaatcatcacgcgctggtaatgtcgtaatccatttggcgcagtgcgtctaatgtggctttggcttcatcttcgtcgatgatgctcatggcaaatccgacgtgtaccagcacccactggcccagtagatcggcagggttaccttcacaaatcagggcgatattcacatcgcgcttgataccacatacttcaacctgcgcaagctggtgaatatcttcaccgacagccagcacctggcctggaacgccaatacacattattaactccggttattcaacttcaatacttttgacgatcaggctatcgccggtatcgacacgcaaccgctcgccgtgacagagcggacactgcgcatcgtgctgatgaatctccaccacctggctgcaatcccagcaccaagcctgggcgggtttatagacgatatgtaaatcgcacccttgcgccaccgttccgtggcagacaatttcaaaactaaaacggacggcgctctcctcaacgcaggagagcgcgccaatttccagccacacggcggtgacgcgcttaacatcgtgctgctccgcctgccgttggataatttcaacggcgctctggcaaagagacaactcatgcattttcgccactcctgcgaccaaacagcagggcgcgacgccctgcgtgtggtacatccggattcgtgactggcaggctaaggatcattcgtgcgcagtcatccgtcaggcgttggccctcttcaatgctcatgctgtggctaagcgggctcatcaggctacaggagagatattggctaacaccgtccagttcgccaacggtaaaggtcatagtgccatacggcagttgcagaccaattttttcactcactttgcgcagcggccagagttgatccgggccggggaagataactgcactcagcatccacggggtgatcacacaccccgtccactgaccttcgaacagcgtaaaatcagaaacatacaccggcatactaggatgcagaaaagagagatcgtgcatgctacgccgggcaatttcttcaaacactgcctgtacttgcgccttcggggaggtctggaaacctgctatctcttcagtcatgaatcgcctcccgtgggatggcttccacgccagattcacgcagcgcagccagaacctgctcaagcgcaggttcaatcattgcttcaaccgtcggcgttaagccgatgtgtggctccaggctttccgggatcacgccgaccagggtcagctttttcggaaactcgccggtgaagcgcagggcgctcaagacgtcggccaggccaagctgatgcggagagattttgttggtaaacaacgccggaacttcttcatcccgcaggatcatcatcgttcccggcgcgttctttttgctgacaatggcatccgcaataatcaaatgatcgcgatttgccatgtcgccaagcagctccattcccgccgtgccgccatcgaggatctcaacataatccggcagaatgtatcgttgctctaacgcttcgacaatccgcacaccgatggcttcatcggtcagcaaaatattgccgacccctaagactaaaatacgcattacagaaccttcacactaaccacttcgttgccgtcagcatccactacgtgtaccgcacaggccatgcacgggtcaaaggagtgaatggtacgcaccacttccagcggtttattcggatcggcaaccggtgtacccaccaggctctgctcgtaaggaccgacgtcatcattgaagttacgcggaccagagttccaggtacttggaacaaccgcctggtagttgctgatgataccgtctttaataaccatccagtgagagagcataccgcgcggcgcttcgaggaagccaacacctttgaattcacccgttgccggaatgttcggcttcacaaaggtggtgtgatcgcctttgccgatattggtgatcagtgcactgtattggttttgcaggatatcctgcaattcacagcagtgaacggtacgaccaataatacggcccagcgtggagtgcagctgtgccacttccagcgtgttgccagtcagtttctgataaatcgcaacgatttcattcagtttgttctgggtagattcgcgacctgccgccagtttcaccagcatattagccagtggccccacttctaccgttttgccgtagaaagtcggacttttcacccaggaatatttcccgtcgtcagaccaaccatcataagccggaatggtggtgccttcccacggtgcctgcggcgcttcgtctttataccaggagtgcttcgcgctttcctgaatgcctttgatcaggtattcatcggaatgagaagtgatcggacgatagctggacagatccgcattctcaatgtagccgcccgggaacaggaagctgccgtttttactgtcggtcgggaattccggcacgctcaggtagttcaccgcacctttaccgcgtgtcagccattccgggtagaacgcggcaataactgcggtatcaaccttataaacctgctcaacaaagtcgctcagtttgtcgatgaaagacttgatgtacatcaggcgctcaaggttcagcacgcccaaaccgtcgaggttgatcgggttcgcgacaccacctaccgccaggttctgaatgtgcggcgttttaccgcccagcagcgccacgacgcggttagcgtcacgctggcactccaacgcttgcaggtagtgcgctaccgcaatcaggttcacttccggcggcagtttcatcgccggatgaccccagtagccattagcgaaaatacccaactgaccgctggcaaccagatctttgatcttgttctgaactttggtgaactcttccggactgttcaggtgccaggtgctaacgcctttcagcatttcggaggctttggttgggtcagcttgcagtgcagaagtgatgtccacccagtccagcgcgctaagctgatagaaatgaacaatatggtcatgcgtggtgtgcgcagccagaatgatgttacggatgtattgcgcgttaaccggaacgtcgatattcagcgcactttctgccgcacgaacggaagacagcgcgtgagtggtagtacatacgccacagatacgttgcacaatcatccatgcatcgcgcggatcgcggtttttcacgatctcttccatgccgcgccacatggtaccggaagcccatgctttgctaacgacgccattttcgatttcgcaatcgatgcgtaaatgcccctcaatacgggttaccggatcaatagtaattctctggctcatgctttgctcgcctcatgacgattatgatcgttttgttttaaaggaggaagtatcggcagtagacgaatgagtacgatgtaagcgcaaatctcaatagccacaaaaccaatagaaatcaacagttcttcccaggtcgggaagtaggcgtaaccgccgcccgggttgaatgccaccaggctataggtcagacgccaggttgcacaacctaacagtgcgctcagtgcactcaggaacagcatgcgggaatcattacgcagcttcgccacacgcagaacgaccagcgggaagagcatcagcaggacttcaatccagaacatcacggagtagaagtcaccggcaaacgctaagctcagcttgtcgcgatagataagctcgccaaagcgcagcacgatgaaaatcgccagcaacacactgatggtgttggtcagcttaacaaacagactcttttcatccggaccgttgccacgcagacccgcctgcaccaggctaccttcaaagatgacaatgctgaagcccatgatgaacgccgtcagcaggctgaacagcggcaacatttcatagctctgccacaacggatgcaccttgtagcccgcgctgatcatcaggctccccatactagactggtgcatggtcggcagcagcgcaccgagcgcgatgatgaagaacatcaccttgtttagtcgctgtaggctcaccttccaccccagacgttcaaacagtgccggagcaaactccagtgccatcacgccgatatagatggtcatacagaccgccgtctcgaacagtacgctgttcacgttgaagtgacccggaatgtagaagtacggcaggttccagtagcgacccacgtcgatagtgatgctcaagccacccagactgtaaccaaacagactcgccaacagcgccggacgcaccagcggatggtattgcccacggttaaagacgtataccgcccacgccagcgcccagccgccacaggcaaagccggtgccaatcagcaggtcaaacgcgatccacacgccccacgggaagccgccgttcaggtcagagacagagcccagaccgaacaccagacgcttcacaatcaggagcatacagatgacgattaacggtccaaaaatcatgaccggtttactgatgattttgccgcccagcggttgtggatcatgactcatgatcgtctcctccgtcgtgattattcaactctcatgatcgtctcctccgtcgtgatggtcgtttttggtgttgcgacgaaccagcacggttaagcccgccagcacagccagtggtagcatcatgcctttatacagggtgtgttgaatattttcggaacgcgcaccggtagaaagatcgtccagtttcggcaggtcgagattttcataaggcacacccgtcagtaccagaacctgagtaccgccgccctctttctcgccgtacagatgcggataatatttcggcaccgtatgcaggtaagtgtcgccagatttcagcgtctgacgcggatagtggtattcgctgccaggcttcagcgccagacgttttttcgcctccgccatcagctcttcacgcgtaccgaaaatcaccgcgcccgccgggcacacttctacgcagccaggtagaccgcctttatcgagacgttccacacctttctggttgcacagctcgcacttatgcagcgcaccaaacgggttgttgtagtcgtacttcggcacgttgtacggacaggcgaccatgcagtaacggcagccggtgcacacatctttgtcgtaatggacaatgccggttttcggatcttttttcagtgcagagaccgggcacacagagacacagttcggatcgacgcagtgcatacactgtttcttaatgtacgcgtagccgttctcctcctggtctttgttgacccctgtgccgctggtccacacctgaatgatgttattggtatacgggctcagtttgtcgttgttgctccaggtctgttccccttgcgggttacgttcagggaaattgatatcctgacacttggtgacgcaagcctggcagcctacgcacaaggtgctgtcgtacaacatccccaggcttcccggaattggcgggcggttttcagcagccgcatgactgacagacggcagcgcgcccgtcagcaatgccccgcaggaggctgctttaataaaattacgtctgttcacggttattctccccgactgtcagcgttatctttcttttgctgacgacccagttcacgcaccgccatcacgctgacaccggcaaccaacccaaccacaccgccgagcaaaccaatagcgcctgcagagacgttgccgccctctttagcgttaacatccggtttctgactacgcggagtttgattttcgacgttggcaagctgatggatgcctttatggaagccgataccttcttcgttacagccatagcaagggtgaccaatcgccaccggccacacaccgccaacatcgcagaattgcagcgtactgcagttgccgtaagtttctggccctttacagccgaggtggtacaggcaccagccttcgcggtggccttcatcaccgaactctttggcaaaacgaccagcatcgaagtgcgggcgacgttcgcagtgttcgtgaatcagacggccataggcgaaggtcggacggtttttgtcatccagtttcggcggtttgccgtaagtgatgatgtgcgcaacggtcgcgaggaagttgtgcgggttcggcgggcagcccggaatattgataacggttttgcctggcagaacttcttgcaggctgactgcgccagttgggttaactccagctgcggcaacaccgccccacgcagagcaggaaccgatagcgataatggctgctgcgccttccgccgctttgcggatgtgatccacaatcggctcaccggcaaccatgcaataaataccgttatcttttaatgggatggaaccatccaccactaacacatactgccctttgtacttctcgagagcgttatgtttgttctcttcgacctgatgaccgaaggcggcggaaagcacttcgtgatactccagagagatagtctccagtacgaggttttctaccgttggatgcgttgcacgaagcagagattccgtacaaccggtgcactcctgcgcgccaatccagataactggcggacgctgcgggttagtaacgctttcggccatctctgcagcggctttgctacttaaccccatggtggcggctaatgctgcacaaagcttcatgaaatcacgacggttaatgccgtgagaatggatgagggtgttatctccagtcatttatagttattccgttgcgaagacctggcatatattttgcctcaatcgcaaaatcaataatgcgatcgatgcgccatttaccacacatttattatggttatcgatatcatgatactgcggcggggcgctaaaacgaagggaagaagcattagtgtaattaattaaagcaagataatacgtatgtttgatcaattttcgaggcgataaccggccataaaaaagcgcaacgtagaacaggaattattctcacgaaagaaatccattaccatctctttatccagtccatagcggcgcgtcagaatacccgcttcccaggcgctaagctggcgatctccggtcttttcgtacatccggtgactgtagcctaatacaaaaccgcgtttataatcggcacagaattttgtcacattaaccgcactgtcggcatgcgttgcttttaatcccgccattaagcctttaccaaaatggttattcatcgttcacctcattcgctatatattgtcatatatagcgatattttaggcaaagaacgacttttgcgcacgctattttttcatgcttgtttaagacgtaatcccgtaagagataaacctatcaggagagatatttatcgaaccatttcagtgtcctttgccaggcaagatcggcggcagatttgtcataacggggcgtggaatcattatggaatccgtgattaacccccggatagatatacgcctcataaaccttattattggctttcaacgccgcctcgtaagcaggccagccctcgttgattcgggtgtccagttccgcgaagtggagtagtaaaggcgcttcaatcttcgccacatcggcagtgggtgcctgacgaccataaaacggcaccgcgcaggccagttccggatacgcgacagccgccgcgttgcttacgccaccgccatagcaaaatccggtaatacccactttgcctgtcgcttgcggatagcgttgcataaactcaattgcggcaaagaaatcattcatcagtttgttggatcaacctgctgttgcagctcacgacctttatcatcatttcccggataacctccaacggaacttaagccgtcaggtgccagggcgatataccccgccttcgccactcgccgtgccacatcttcgatatacggattcagtccacgattctcatgcaccaccactacggctggcgttttgccgctcatctttgcgggcttcaccagataaccccgcacctcgccgtgaccatttgggctaggatacgtgatgtactcagcaacaatttccgggtcggtaaactctacctgagtcgccagcgcataatttggcttgagcaaatcaaacaacgctaatgccgtcatcccgcctaccgcacttcgccgcaaggttgaggaactcacgtttcgagattttcccgtgagcgtaatagtcatagtaatccagcaactcttgtgggaaatctttggcggttaaacgcggcatcgttgcactcctcagttggtgtttttttaagcaaagcataagcacgtatttttgcccagtttttcgtcactctgtgagccagactacgggatacgcgctggcgaatcgctaaactagaaacattgtttcgaaattgaacggtggaaaggagaggtcatggtctggttagcgaatcccgaacgttacgggcagatgcaataccgctattgcggaaaaagtggtttacgcctgcccgcgttaagcctcggtttatggcacaatttcggtcacgttaacgcgctggaaagtcagcgtgcgatcctgcgtaaagcgtttgatttgggcattacgcactttgatttagccaacaattacgggccgcctccaggaagcgcagaagagaactttggtcgcctgctgcgggaggattttgccgcttatcgcgatgaactgattatctctaccaaggctggctacgatatgtggcccggcccttacggctctggcggtagtcgtaaatacctgctcgccagcctcgaccaaagcctgaagcgtatggggcttgagtatgtcgatatcttttactctcatcgcgtcgatgaaaatacgccgatggaagaaaccgcctctgcgctggctcatgcggtacaaagcggtaaggcgctgtatgtcgggatctcctcttacagcccagagcggacgcaaaaaatggtcgagttgctgcgcgagtggaaaattccgctgttaattcatcaacctagctacaatttactgaaccgctgggtggataaaagcggcctgctggataccctgcaaaataacggcgtgggctgtattgcctttactcctctggctcagggattgctgaccggaaaatatctcaacggcattccgcaagatagtcggatgcatcgtgaagggaataaagttcgtggtctgacaccgaaaatgcttaccgaagccaacctcaacagcctgcgcttattgaatgaaatggcacagcagcgtggacaaagtatggcgcaaatggcgttaagctggttgctgaaagatgatcgcgtgacgagcgtattgattggtgccagccgcgcggagcaactagaggagaacgtgcaggcgctgaataatctgacatttagcaccaaggagctggcgcagattgatcagcatatcgccgatggcgagctgaatctgtggcaggcgtcttccgataaatgacctgttaataacgggcgcgcgaaccgcgcccgaatcagatcagtgattatgacgagtcagtcggtcaagatagcccatcacaaatgcagaaagcacaaacgtcagatggataatgacgtaccacatcagtttgttatccgggacatttttcgcatccataaagacgcgcagtaagtgaatggaagaaattgccacaatgctcgctgctactttgtttttcaggctcgttgcgtccattttccccagccagttcagcttctctttgttctcggagatatccagctgactgacgaaattctcataaccggaaaacatcaccatcaccagcaaaccgccaaccagcgtcatatccaccaggctcagcaacacgaggatcaaatcactttccgccatgctgaagatattcggcagtacgtgaataatctcctggaagaacttcagcgccagggcaactaacgccaggctaaggccaaagtacacgggggcaagcagccagcgagaagcatacattgcattttcaagaaaacgttccatacattcctgtcgtgtagttaaaacgggcaacagtatatcgcaattgagtaaacagcacgcaacagcaaatcaacatatacgttaaacctttgtcgcataattctgaggtttagggatcttcctggttcccttatcaacgcatcgagaacgtctacccttaaaggacgttgaacctgaagggagaaaaacgatgtctcatttaaaagacccgaccacgcagtattacactggtgaatatcccaaacagaaacaaccgacgccaggcatccaggcgaagatgacaccggtaccggattgcggcgagaaaacctatgttggtagcggtcgcctgaaagatcgtaaagcactggtgacagggggcgattccggaataggtcgcgctgccgccatcgcttacgcgcgtgaaggggctgacgtggcgatcagttatcttcccgtggaagaagaagacgctcaggatgtgaaaaagatcattgaagaatgcggacgcaaagccgttctgctgccaggcgatttaagcgatgagaaatttgcccgtagcctggttcacgaagcgcacaaggcgttaggcgggctggatattatggcgctggtcgccgggaaacaggttgccattccggatattgcagacctcaccagcgaacagtttcaaaagacctttgccattaacgttttcgcgctgttctggctaacccaggaagcgatccccctgctaccgaaaggtgcaagtatcatcaccactagcagtatccaggcataccagccaagtccgcatttactggactatgcggctacgaaggcggcgattctgaactacagccgtggcttggcaaaacaggtcgcggagaaaggtattcgggtgaatattgtcgcgccaggcccgatctggacagcactgcaaatttccggcggacaaacgcaggataagatcccgcagtttggtcagcaaacgccgatgaaacgtgcggggcaaccggcggaactggcccctgtatatgtttatctggcaagtcaggagagcagctacgtcaccgcagaagtgcacggcgtgtgcggcggcgagcatttaggttaaaaaaatgcccggttgtgaaaagcaaccgggcatcattgtgaattcactcttacctgatgtggcgaaaacgccttatccgcctacaaacgcatgaagattcaacatgttgcaatagattttgtaggcctgataagcgtagcgcatcaggcattgagcacctaatgccggatgcgtcgtgaacgccttatccggcctacaaacgcacgaagattcaacatgttgcaatagattttgtaggcctgatgagcgtagcgcatcaggcaattctactttacttcgctttggcggtttcttcgccgaccagacctatcttcaggtaacccgcctgatgcagcgtatccattaccttcatcaacgtctcgtaatcgacggttttgtccgctcggaagaagatggtggtgtctttcttgccttcggttaacgcattcaacgccgtaatcattgtttcatcggtgaccggatcgttaccgataaacatgctgttgtctgccttcacgctcagataaaccggtttttccgggcgcggctgcggcgtgctggtagaagcaggcaagttcaccttcacatctaccgtcgctaacggtgccgccaccataaagataatcagcagaaccaacatcacgtcgataaacggcgtcacgttgatatcatgcatttcgccgttatcgtcgaggttttcgttaagatgcattgccatcggatattatcctgcgcgtaatttttgtgcgacacgaaccggatgcgcagcggcgctggcttccagatccaggtcacggctttgcagcaacaatacctgcgctgcaacatcacccagcatcgctttaaagccgccaatctggcgtgcaaatacgttatagataacgaccgcaggaatcgctgccacgaggccgattgccgttgctaacagagcttctgcgatacccggcgcaacgactgccaggttagtggtctgcgtttgcgcgataccaataaagctgttcatgatgccccagaccgtaccaaacagaccaacgaacggagaaatcgcgccgatggttgccagatagccgttaccgcggcccatttgacgacccactgcggcgacccgacgctccagacggaagctggtacgttctttaataccttcgttatcgtcgctgccttcactcagttccagctcattctgcgcttcattgagcaaatgcaggcttaagcttttgctaccaaaatcagcggcgatatcgttggcctggtttaaggaacgcgcttcagccagcagttgctgctcgcgcttaaggcgacgcttctgattgaagaactctacgctcttactgaagaagattgcccaggtgactacggaggccaaaataagcccaatcatcacgcacttaacgacaatatcggcgtgctgatacataccccagacggaaaggtccgtctgcattaaattattacccactgtgtatctccaggacgcaagtcacaaaatctgcgcataataatatcaaaacgacgtcgaattgatagtcgttctcattactatttgcatactgccgtacctttgctttcttttccttgcgtttacgcagtaaaaaagtcaccagcacgccatttgcgaaaattttctgctttatgccaattcttcaggatgcgcccgcgaatattcatgctagtttagacatccagacgtataaaaacaggaatcccgacatggcggacaaaaagcttgatactcaactggtgaatgcaggacgcagcaaaaaatacactctcggcgcggtaaatagcgtgattcagcgcgcttctagcctggtctttgacagtgtagaagccaaaaaacacgcgacacgtaatcgcgccaatggagagttgttctatggacggcgcggaacgttaacccatttctccttacaacaagcgatgtgtgaactggaaggtggcgcaggctgcgtgctatttccctgcggggcggcagcggttgctaattccattcttgcttttatcgaacagggcgatcatgtgttgatgaccaacaccgcctatgaaccgagtcaggatttctgtagcaaaatcctcagcaaactgggcgtaacgacaagttggtttgatccgctgattggtgccgatatcgttaagcatctgcagccaaacactaaaatcgtgtttctggaaagcccaggctccatcaccatggaagtccacgacgttccggcgattgttgccgccgtacgcagtgtggtgccggatgccatcattatgatcgacaacacctgggcagccggtgtgctgtttaaggcgctggattttggcatcgatgtttctattcaagccgccaccaaatatctggttgggcatagtgatgcgatgattggcactgccgtgtgcaatgcccgttgctgggagcagctacgggaaaatgcctatctgatgggccagatggtcgatgccgataccgcctatataaccagccgtggcctgcgcacattaggtgtgcgtttgcgtcaacatcatgaaagcagtctgaaagtggctgaatggctggcagaacatccgcaagttgcgcgagttaaccaccctgctctgcctggcagtaaaggtcacgaattctggaaacgagactttacaggcagcagcgggctattttcctttgtgcttaagaaaaaactcaataatgaagagctggcgaactatctggataacttcagtttattcagcatggcctacagctggggcgggtatgaaagcttgatcctggcaaatcaaccagaacatatcgccgccattcgcccacaaggcgagatcgattttagcgggaccttgattcgcctgcatattggtctggaagatgtcgacgatctgattgccgatctggacgccggttttgcgcgaattgtataacattgccacttttggacaattttgcagacattttattgtgaaaagtcttaaattgttgcgtccgggatcaaggcgtcccggacgattcaggagtacaataggcagataaaggcttaaacgctgttccacaggaaagtccatggctgttattcaagatatcatcgctgcgctctggcaacacgactttgccgcgctggcggatcctcatattgttagcgttgtttactttgtcatgtttgccacgctgtttttagaaaacggcctgctgcccgccagttttttgccaggcgacagcttgttgatactggcaggcgcattgattgcccagggggttatggattttctgcctacgattgcgattctgaccgccgcagcaagtctgggctgctggctaagttatattcaggggcgctggttagggaataccaaaacggtgaaaggctggctggcacagcttcctgctaaatatcaccagcgcgccacctgcatgtttgaccgccacggtctgctggcgctgctggctggacgttttcttgcatttgtccgtacgctgctgccaaccatggcgggaatttccggtctgccaaaccgccgcttccagtttttcaactggttaagtggattgctgtgggtcagcgtggtaaccagttttggctatgccttaagtatgattccgttcgttaaacgccatgaagatcaggtaatgacgttcctgatgatcctgccaattgccttgttaaccgctggcttgttaggcacgctgtttgtggtgattaaaaaaaaatactgtaacgcctgacgattttccccgttcccggttgctgtaccgggaacgtatttaattcccctgcatcgcccgcattcttgccgcatcttcccccggcgtcacaccgaagtaacgtttaaactcacggctaaattggcttgcgctttcatagccgacgcgcatcgctgctgcgctggccttcatgccgtcatggatgatcatcatccgcgccttatgcagacggtaattcttcaaatactgcaacgggctggtactggtgacagacttaaaattatggtggaacgcgcttacgctcatgttggcttctgccgccagttgctcgacgctcaggttttcggtgtatttattctcaatccgtttcagcacgcggctaatcagactgaagtgagtctggcgactgaccagcgccagtaacgcgccgccgcaaggtccggtcagcacgtagtacagaatttcgcggatgatctgtttgccgagaatacgcgcatccagtggtcgctccatcacgtcgagtaaccgctccgccgcgcataaaatctcttcacttaacgtggcggagttaatcccgctggctgccatgctcggctggaaatgctcatcttcgccaatgtccatcaacagttcctgtaactgcaaaatatcgacattgagacgcaaccctgccagcggcacctcactcgtggcataggtttcgcactcaaacggcaacggcaccgtcagcagcaggtattcattggcatcataacgaaacacgcgttcattgatataaccgattttatgcccggaaaagagaattatgatgccaggctcgtacatcaccggtgtacgtgcgaaaggcgtctcgccatacaacaaacgcacatcgggcaacagtccactcaaactattttctttatttttcagtttattaactttatccgccagcaagcggcaaatctcttcacgtttcatatcgcgtaatttcttaggaataatgcggcaattactttgtgcgcaattttgtagcatttctccagcactctggagaaataggcaagacattggcagaaatgagcattgagagccagggcgctggcgatcacaatgaaaaacatcaggcagatcgttctctgccctcatattggcccagcaaagggagcaagtaatgaacaactttaatctgcacaccccaacccgcattctgtttggtaaaggcgcaatcgctggtttacgcgaacaaattcctcacgatgctcgcgtattgattacctacggcggcggcagcgtgaaaaaaaccggcgttctcgatcaagttctggatgccctgaaaggcatggacgtgctggaatttggcggtattgagccaaacccggcttatgaaacgctgatgaacgccgtgaaactggttcgcgaacagaaagtgactttcctgctggcggttggcggcggttctgtactggacggcaccaaatttatcgccgcagcggctaactatccggaaaatatcgatccgtggcacattctgcaaacgggcggtaaagagattaaaagcgccatcccgatgggctgtgtgctgacgctgccagcaaccggtagtgaatccaacgcaggcgcggtgatctcccgtaaaaccacaggcgacaagcaggcgttccattctgcccatgttcagccggtatttgccgtgctcgatccggtttatacctacaccctgccgccgcgtcaggtggctaacggcgtagtggacgcctttgtacacaccgtggaacagtatgttaccaaaccggttgatgccaaaattcaggaccgtttcgcagaaggcattttgctgacgctaatcgaagatggtccgaaagccctgaaagagccagaaaactacgatgtgcgcgccaacgtcatgtgggcggcgactcaggcgctgaacggtttgattggcgctggcgtaccgcaggactgggcaacgcatatgctgggccacgaactgactgcgatgcacggtctggatcacgcgcaaacactggctatcgtcctgcctgcactgtggaatgaaaaacgcgataccaagcgcgctaagctgctgcaatatgctgaacgcgtctggaacatcactgaaggttccgatgatgagcgtattgacgccgcgattgccgcaacccgcaatttctttgagcaattaggcgtgccgacccacctctccgactacggtctggacggcagctccatcccggctttgctgaaaaaactggaagagcacggcatgacccaactgggcgaaaatcatgacattacgttggatgtcagccgccgtatatacgaagccgcccgctaagctttttacgcctcaaactttcgttttcgggcatttcgtccagacttaagttcacaacacctcaccggagcctgctccggtgagttcatataaaggaggaacgtatggctaatccaaccgttattaagctacaggatggcaatgtcatgccccagctgggactgggcgtctggcaagcaagtaatgaggaagtaatcaccgccattcaaaaagcgttagaagtgggttatcgcagcattgataccgccgcggcctacaagaacgaagaaggtgtcggcaaagccctgaaaaatgccagtgtcaacagagaagaactgttcatcaccactaagctgtggaacgacgaccacaagcgcccccgcgaagccctgctcgacagcctgaaaaaactccagcttgattatatcgacctctacttaatgcactggcccgttcccgctatcgaccattatgtcgaagcatggaaaggcatgatcgaattgcaaaaagagggattaatcaaaagcatcggcgtgtgcaacttccagatccatcacctgcaacgcctgattgatgaaactggcgtgacgcctgtgataaaccagatcgaacttcatccgctgatgcaacaacgccagctacacgcctggaacgcgacacacaaaatccagaccgaatcctggagcccattagcgcaaggagggaaaggcgttttcgatcagaaagtcattcgcgatctggcagataaatacggcaaaaccccggcgcagattgttatccgctggcatctggatagcggcctggtggtgatcccgaaaagcgtcacacctagtcgtattgccgaaaactttgatgtctgggatttccgtctcgacaaagacgaactcggcgaaattgcaaaactcgatcagggcaagcgtctcggtcccgatcctgaccagttcggcggctaacatgcaaattctcccggtggcggtaatgttccgctaccggacttttcagaaatcatttattcccctcgcgtcccgcccgttgttactcttccttgttcaggaatgccaaatataaggacatcatcatgcagagccggaagctcttaaaagaacaactcatctatatccgggataaacgcaacggagaggtgaaaaacagatgaaaataatacttctgtttttagcagccctggcaagttttaccgtacacgcacagccccccagtcagaccgtagaacaaacagtccggcatatttatcagaactataaaagtgatgccactgccccttattttggtgaaaccggagagcgggcgataacttctgcgcgtattcaacaggcgcttaccctgaacgacaatcttacgctgccgggcaatattggctggctggattatgatccggtttgtgattgtcaggattttggcgatctggtgctagaaagcgttgcgataacccaaactgacgccgatcatgccgatgccgttgtgcgctttcgtatctttaaagatgataaagaaaagaccacgcagacactgaaaatggtggcggaaaatggtcgttgggtcattgacgatattgtcagcaatcatggcagcgtcttacaagcagttaatagcgagaatgaaaaaacgctggccgctttagctagcttgcaaaaagaacagccggaagcctttgttgccgaactctttgaacatattgctgattatagctggccgtggacgtgggtggtttccgactcttaccgccaggcggttaatgccttctataaaaccaccttcaagacggccaataatcccgatgaagatatgcaaatagaacggcaatttatttacgacaatccgatctgttttggcgaagagagcctatttagtcgcgttgatgaaattcgagtcctggagaaaaccgccgattccgcccgcattcatgttcgttttacgctgaccaatggcaacaacgaagagcaagaactggttttacagcggcgcgaaggcaagtgggaaatcgctgattttatccgcccgaacagcggcagcctacttaagcagattgaggcaaaaactgccgccagattaaagcaatgagctgaattaaataacaattagccggaacaataaataaaagggaacactatatgaaaacgattttcaccgtgggagctgttgttctggcaacctgcttgctcagtggctgcgtcaatgagcaaaaggtcaatcagctggcgagcaatgtgcaaacattaaatgccaaaatcgcccggcttgagcaggatatgaaagcactacgcccacaaatctatgctgccaaatccgaagctaacagagccaatacgcgtcttgatgctcaggactattttgattgcctgcgctgcttgcgtatgtacgcagaatgataaaaaaatccccggtagcgtgtcagttgccggggatattttttaacgtccaaccgccgctttaggccgtttcttcgcaccagcattcaccggacgagattgcgtagagctcgctttttttgccgtagcaggcgtctgacgctgggtcgccatcggcgtatgtttcgtcaacgccggacgggtattgcggttctggcgacgagcttcacgcatctcttcaatggttggcgcaggcactaagcaatcgcgacggctgccaatcagatgctttttgcccatcgcttccagcgcctggcggattaacggccagtttgccggatcgtggtaacgcaacaacgctttatgcaaacgacgctgtttgtcgcccttcggtacgaagacgtcttcgctcttataaccaatcttcgccagcgggtttttcccggtgtaatacatggtggtactgttcgccagcgggctcggatagaagttctgcacctggtcgaggcggaagcggtgctttttcagccacagcgccagattcaccatatcttcatcacgcgtaccggggtgcgcggagatgaaataggggatcagatactgctctttacctgcctgtttactgtaagtatcgaacagctctttaaagcggtcatagctgcccatgcccggcttcatcatcttgcttaacggcccttcttcggtatgttccggggcaatcttcagataaccgccgacgtgatgggtcgccagttctttgatatagcgcggatcttctacggctatgtcataacgcacaccagaggcaatcaggatctttttaatgcctttcagatcacgcgcacggcgatagaggttgatcgttggttcgtggttcgtgtccatgtgcggacaaatatccggataaacgcagctcaaacggcgacaagtttgttcagcgcgtgggcttttgcagcgcaacatatacatgttggcagttggcccaccaagatcggaaatcacgcccgtaaaacctggaacggtgtcgcggatcgcttcgatctcattaatgatgctatcttcggaacggctctgaataatgcgcccttcgtgctcggtgatagaacagaaagagcagccgccaaagcagccacgcataatgttgacgctaaaacggatcatttcgtaagccggaatacgggcattgccataggccggatgtggcacgcgcttgtatggcagcgcaaaaacgctgtccatctcttcggtagaaagcggaatagcaggcgggttgatccacacatagcggtcgccgtgtttttgcatcaatgcgcgggcacagcctgggttggtttcgtggtgcagaatacggctagcatgggcgtacagcactttatcgcccttcactttctcgaaagaaggcagcaacacgtaggttttttcccacggtttcgggcgcggtggctgcacggttacggctttggcttcctgctttttcggtgccaccggtttgttatccgcgcacggcaaatcttcaccatacggatgcgggattgggtcgatttttccaggggtatcaagacgggtggaatccacgccgctccagccaggcagcgcctctttcacgataatcgcggtattacgcacatcgcggatttcactaattggctcgcccatcgccagacgatgcgccacttccaccagcggacgctcaccgttaccaaacatcagcatgtcggctttgctatccaccagcacggaacggcgcacggtatcggaccagtaatcataatgcgcggtacggcgcagactagcctcaataccgccgaggatcaccggtacatctttccacgcctctttacaacgctgggtataaaccagtgtggcgcgatccgggcgcttacccgcgacgttatccggcgtgtaggcatcgtcatgacgtaaacggcgatcggcggtataacggttgatcatgctatccatgttgccagcagtaacaccgaaaaacagattcggtttacccagacgcataaagtcgtctttgctgctccagtccggctgggcgatgatcccgacgcgaaagccctgcgcttccagcatacgaccgcaaatcgccatcccgaagcttgggtgatcgacatacgcgtcgccagtaaccaaaatgatgtcgcagctatcccagccaagttgatccatctcttcacgagacatcggcaaaaacggtgccggtccaaaacaggcggcccagtactgcggccaggagaacaggtcgcgatccggttggatcagggagatagagctcattttgcttccagaaatgataaaaaaataatcaaaggccggggattataagccggaacgaaagagaaatcgaaaggtattccatactcgccctcctcgggcgagtatgaagattacggtaccggattgaccaacagttgcccaatgctgccacggtccgccatttccagcgtctgactgttgaagtagaacgggaagtgcgcccaggaaggctgaccgaaataaacaagcagctccacttgtccgtcaacccaaacggtatctttccagcctctgtcttccgggaacggcatcgcgccattcacgttacggatctggaacattacgccttcaatatggaacgcttgcggctcgtccgcgcgtaccgtccagcgttcccacgttccttgctgcgcggtgacatcaatacggttgacgtcccacagctgtccattaatacccgggtcatcacccagactgatatcgcgactgcgaattgggctaccagccatgatttcagttggcagcaagcgcatcggaagactgtctgtgaccagcggcagaaggccggttgggcgcagcgttagcaccagggtagaaaccagaatactggatggctcaaagaagccacgaatacgatcaacaatgctcgccgcttcgccacaggtgatgctcacttcatcgccgttgctcatatccaccagaatctcgcggcgctcgcccggtgccaggctaagttgcttcacgcttacaggagcaggcaggaatccctgatcgccagaaatcacatgtaacgggcgaccatcgttcatctgtagttgatagcgacgagagttgctcgcgttcagcagtcgcaagcgcacccagccacggctgacttcaacgtacgggctttgtacaccgttaaccagcagcgtatcaccaacaaagccgccgcttcccggttcgttgtattctggcgtaccaaagttatccagccgtttatcctggataatgaccggaaaatcatccacaccataatggttggggataggcaggctcttgctgacttcatcttccaccagccacattccggcaaggccgttatagacctgctgagccgtgcggttgggagtattggcgtgataccacagagtagctgcgttctggcgaatgggcagtacgggtgcccagtcagcgtttgggctcatcatccgtgccggaccgcccatcagcgggcctggtacctgtagcccggccaccgtcatactgacattttctgtcaggcggttgctgtaaataagcttaacatcgtcgcccttccagacgcggatagtcggccccaggtaacgaccattgattccccagacgctcgcgcgtgtccctggcgtaaaactccagtgcgcacgttgtacagtcataaacagcggttgcccacggcgagattcaagtagcggcggaacgggtagcggttgctgttgcccggctgcgctggccttcaggggaacagcgcctgcacaaagtgcaatcccgcttgcctgaatgaactgacgccgactgagactcatatttgctccatgtaaaactggctaaagtaataccgtgcaggaaagtgttccccgcaaaaatacagattgccgacttaaacttttccggcggcttcgcgttctgcgacttctttatcgagctcggcgattttttgttccattatgctacgacaatgggcagccagctcacgaacctgatctttgccatactgactgacgtcaattggcggcagcatttcgacaatcaccagaccgttgtgcagtcgattaagattaatcttattgctagttgtagagacgcacacgggaataatcgggacgcccgccgcaattgccgcgtgaaatgctccagtcttgaacggtagcaggccgcgaccacggctgcgggttccttccgggaacatccagatggaaatacggcgttttttgaagtgattcactacttccgcaatggtgccgtgagctttagtgcgattgtttctgtcgatcaataagttgccggttaaccagtacaactgcccgaagaaggggatccacagcaagctctttttacctaccgtcaccgtcggcggttgcacgatgttgcttgctgtcaccatgtcatagttgttctggtggttagcgatatagatagcattgccgtagctttcagcgtctgtaggtttacggcactcaactttcaggccaaacagcggcgcaagacggccaaacatatgcccaaaggtggccacatgtttcgggttacgcgggctgaaaaggcagtaaatggagccgaatacacagactaagatgctgtaaatcacggtaataataagacgaaagatatatagcataacaccctctgaaggtctgagagactggcattgtacgtcacctgaaatcaggttagggcattgttaaaagccgctctctggaaaagcgtattgttaatcgcaacgcatgaataaacaacggtttcaagggaatttttatcgtttccgggggttgaatacgctgccggatgacgacttaacgtttcatccggcgttccttgcaagcgggaggaaacagcgccctccccggcatattactcttcgctatcaccgctgctggcacggcgaggagagtcgatctcaacacgatcgatacgctgcaaaccgcgcatcaacgtaccgcggcgtccacgttcgccagtgactttctgtaactcttccgggcgcagtttaattttgcgtttcccaacatgaatggtcagcgtgctttgcggcggcagaacgtacaattgcgccagaccatcttctccacgcgcggcttctgcgcttggaatgttgataatcttgttgcctttgcccttgctcagctgcggcagatcacttaccgggaacatcaacatacggcctgcctgagtgattgccagcagcatatcggaagcatcttcaatcaccaccggcggcataacatgggcattttccggtaaggtgatcaaagccttacctgcacggttacgcgccaccagatcgttaaaggtgcagacgaaaccgtaacccgcatcggaagccatcagcagtttctgatcgtcgctttccatcagcatatggtcaacggtcgccccaggcggcaacgttaatttgccggtgagcggctcgccctgaccacgcgcgctcggcagcgtaatcgggtcaatggcatagctacgaccggtggaatcaacaaacactaccggttggttgctcttacctttcaccgccgctttgaagctatcacccgctttataattcaggcccggcgcgtcgatatcatggcctttagcgctgcgtacccagcccatctggctcagcacaatggtgacaggttcagacggcagcatgtcgtgctcgctcatcgctttcgcttcttcgcgttcctgcaacgggctacgacgatcgtcaccgtaggcttgcgcgtctgcctgcagttctttcttcagcaggttattcattttacgctcggaagccaaaatgccctgcaactggtcgcgctctttttccagttcactctgctcaccgcgaatcttcatctcttccagtttggcaagatgacgcagtttcagttcgaggatcgcttccgcctgggtttccgtaaggccaaaccggctcatcagcgccggtttcggttcatcttcattacgaatgatctcaatcacttcgtcgatattgagaaacgccaccagcaaaccttcgaggatatgcaggcgcttgaggactttctccagacgatagttcagtcggcggcgcacggtatcgcggcggaacaccagccattcggagaggatttccagcaggtttttcaccgccggacgaccatccagaccgatcatattaaggttaatacgatagctcttttccagatcggtggtagcgaagaggtggttcatcacctgatccatatccacgcggttggaacgcggcacaatcaccaggcgggtcgggttctcgtggtcagattcatcgcgcagatcgtcaaccatcggcagctttttgttgcgcatttgcgcagcaatttgctccagtacgcgcgcaccactaacctgatgcggcaatgcgctgataaccaccgcgccatcttctttcttccacaccgcgcgcatacgcacactaccacgtccgttctcgtagattttacggatctcggcgcggctagtgataatttccgcttcagtcggataatccggcccctgcacgatatccagcagctgatcgagcgtggttttcggctggtcgattaatgcgattgccgcctgagccacttcacgcaggttatgcggtggaatatcggtcgccatgccgacggcaataccggtggtgccgttaagcaaaatgtttggcagacgggcaggtagcattttcggctcctgcaaagtgccgtcgaagtttggcacccagtcagccgtcccctgccccagctcgctcaatagcagctcggaatatttgctcaaccgggattcggtgtaacgcattgccgcgaagcttttcggatcgtccggcgcgccccagttcccctgaccatcaaccagcggataacggtaagagaacggttgcgccatcaggaccatcgcttcataacaggcgctatcgccgtgcggatggtatttacccagtacgtcaccgacggtacgggcgctttttttaaatttggcgctggcattcaggcccagttcagacatcgcatacacaatgcggcgctgaacaggtttcagaccatcaccaataaacggcaacgcacggtccatgatcacgtacatggagtagtttaagtaggcgttttccgtaaattcatgtagcgcaaggcgctctgccatatcgctcattaattctgattcctcaacttattcgccagccttcaaaggggcaatattgccggagatactacattatctgccgcgtcgagtcacaggagatcaacgtgaatagcgccgccggacgtgctccgacggcgataaaggcatcaatgtgccttgatatacaactctttgctgtagacataatcctggggattatgcagcggaaaaccgccaacgtagggtttaagcagtttgattaacggctgatagtagataggaatcagcggtgcctgttggttgatgatcacttctgcctgctgatacaacgcattacgctttgtcgcatcagtgatctgcgtggcctggtttagtaaggcgtcatactgcgcatttttccagtgaccgacgttttcttcactatcgcttttgagcgtgttcaggaagctggaagcatcattgtacgtcgcatcccagctctgccgagacagcatgaaatcaccggctcgtcgggcatcaagataggttttccactccattgtgcgcagcgtcacctgtgcacccagccattttttccattcggaagacaacgctatcgcggtcttttcatgcagatcgtacttgttgtagaacagctcaaagcgtagcggatgagaggcgtcgtatcccgcctgtttcagcaaggcttttgccatcgcgacgcgctcactcattggcttttgcagttcatcgaacgtcgtcgcgctaaagccttttacctctggcggcgtcagcgtggttgcgggcgttctcaaccccagtaccttttgcgcaataagctgtcgatcaaccgtaagatatagcgcccgacgcactcgcacatcgttaaatggcggtttctcaaggttgaagttgtaatattcgctgttcagacgcggaataattcgtagctcgccaggcagacttttttcaatggcgggaatttgctgcgccggaacccaggtgagatcgacctctcccgcgcgatagcggttatagccggtgacgctattatctagcgccagatactcaacctgttgcaatactgtatgttgcgcatcgcggtactttggatttttgcgtgcagtaatcttttcgttaactacccactgatcaagcacaaaggcaccgttgtaaaccatgttctctggcttactccagctatcgccatgtttagcgatgacatgatgaggaaccgggaacagcgtcggccaggcgagcatcgtcgtgaaccaaggaaccggctgctcaagcgtaacttcaagagtacgatcatccgtcgctttgacacccaggcttgtaacatctgctttacccgcaacaatagctgcggcattgttaatgtgcgcctgtgccagatagccagcaaaagggcttgccgttttcgggtcaaccgcgcgctgccagccgaggacaaaatcctctgccgtcagaggctgaccgtcggaccactgcaaaccgctacgcagatggaaaatatagcgcttgccgccgtccagtatctcccagcgttcagcctgagcgggctgcacctggccttcaccgtccatccataccagaccttcaaacagatccagcacaatctgcgcggcagtattctcctccaccttttgcgggtcgagcgtacctgggtcgctatgattgttgtaacgaaagacttgttgcggggcgagcggtgtgttggcgggaacgtcagcagcgtagagaggagccgcacttaccaggctgaccagccataataaatttcgcgtatacatggtattccttaccggagaaattataagcccaacaacaatacgcctgtggcattgttcgctcaaacttatcgcgagtgatttggctcacactccggtaaagaaaaaagcgagttgcccccgcttttccattaattaacggatttcattcaatagttctggatgcttatccagaacacgtaaaagtttgattgtggaaggatgaggttgggcattgcctttttcgtaacggctaaacgcatttacacctcccccaaaaatttcgcttgcctctttttgggtaagagagagcttttttcgaaccttcactataaattcaggtgccactgtttcggcattcacgctagcccgaaatgcctttacttgcgccatgaaagcatcactctcttctttattcatgatgctctcttcgcaatggacacaatataaaccgtggatacctttcaatactgtttttcgtccacggaaggtgtatggaatatctttaatgccagaaaccatttctccctggtggcaaaccggacatttcatattacttctccttaaagctgacgatcagtacgtcatgaattaccgtaattttaagataaacctggcctgtaacaagcctgggtctgtaaacatcctgccagatagtatgatcagagtaggtggtcatgcttttataaaagtcgctctcacttaatccaatgataacattacacataccatcaaaatccaaacctaactcatctgcatttaacagggcactacgtgttgtacgaacttgcccggcattgacaagttttttaacctgactcaaacgtgtatgtggtgtgcgtttttccataacccccgcctccctgttactttagttataacctaaaaggttaattacagcaatgaaaaagcacctaaaaggttagttagatgtacggagatagtgaccacacaaaacgtattctttaaggaaagtgattgaccatataagaaagtggcgcattagtagcgccagtttgaagcaggaatttataagggaagctggagtcaggcatcacgccaacggcacataaacatccgtttccagtcgctgctctgtcaccccttcggcaagattggtgtagtgaaacagaatcggtgctttacgcattttctcgccgcttgcaggcagccagtggcgaatgatgccccataccgtgtgactaatatcgtccagctcgccaacgtggcgggccacggcataacgtccaccggtaagttcaccattgctcacaccataacgattatcgggaatcggttcgctaacgctgccgcagatatcaaagcgaaacgcttccggtgcggtggtggcagggtcgtcccaggcgacgccaaaagtctggctttggttaacaggagaaagcccgtctctttacgccacatgataaatttcgccacgctgtagttgagcaattcagggctacagcggtgcggcaacatcgccacaggtatacttgggaaatcgataatgtttacatccagtgtcaggtttgtcattttgcctccctgcgaaattattcccgggaacgcgtcccgggagcggtaacaattacggatttactttgcggatctgtttgacgtcaatttcaacagaattccagtctttatcgacttcaccctgaatctcaaccgtatctttcggcgtcaccgtcacgccgttccagcgtttgtggtcgatatcaacattgatagtaccgctggcatctttgaacacgtagagatcgtcagagatgcgttcaacgatattgccgcgcagggttacccaggtgtcgtcacgcagggattttgcgctttctacagtcgttacgctgccgttcggcccctggaatcctccggcctgactttgcgttgcgcttgggccagaaaaaccgccctgctctgctgccatcaccggtgcgctgcacagggccattactgcgattactgctgcgaattttttcatgtttattactccctttaatgtctgtttccgagcatttaacaagatagtccttaacaacttcttaagggaaaaaaataaaatttagtgctgtacagagcgcgttacaacacggtttactggcagcaaatacggttatcgcagggatgaaaaaatgcgaattttactgatagaagatgacatgctgattggcgacggcatcaaaacgggccttagtaaaatgggttttagcgtcgactggtttacacaaggtcgtcagggaaaagaggcgctttatagcgcaccttatgatgcggtgatcctggatttaaccttaccaggcatggatggtcgcgatattttgcgcgaatggcgagaaaaaggtcagcgtgagccggtactgatcctgaccgcgcgcgatgcgctggcggaacgtgtagaagggctgcgtctgggagctgacgattatctgtgtaaaccttttgcgttgatagaagtcgccgccaggctggaagctctgatgcgccgaaccaacggccaggccagcaacgagctgcgccacggtaacgtcatgctcgaccccggcaaacgtatcgccacgctggctggcgaacccttaacactgaaaccaaaagaatttgccctgctggaattactgatgcgtaacgctggtcgggtactgagccgcaaactgattgaagagaaactgtatacctgggacgaagaggtcaccagtaatgccgttgaagtgcatgtgcatcatctgcgacgcaaactcggtagtgattttattcgtaccgtgcatggtattggttacacattaggtgagaaatgaaatttacccaacgtcttagtctgcgcgtcaggctgacgctaatctttttaattctggccagcgtgacctggctgctttccagctttgtcgcctggaaacaaacaacggataacgtcgatgaattgttcgacacccaactgatgctgtttgccaagcggttaagtacgctcgatctcaacgaaatcaacgcggcggatcgcatggcacagacgccaaatagattaaaacacggtcatgttgatgacgatgcgctgacctttgccatctttacccacgacggcagaatggtccttaatgatggcgataacggagaagatattccctatagctatcaacgggaaggttttgctgacgggcaactggtcggtgaagacgatccttggcgttttgtctggatgaccagtcctgatggcaaatatcgcatcgttgttggccaggaatgggaataccgtgaagacatggcgctggcgattgttgccgggcaattgatcccgtggctggtcgcactgccgattatgttaatcatcatgatggtactactgggtcgtgaactcgcgccgctgaacaaactggcgctggcactacgtatgcgtgaccctgacagcgaaaaaccactaaacgcgactggcgtacccagcgaagtgcggccactggttgagagcctaaatcaactgttcgcccgcacacatgcgatgatggttcgtgaacgacgctttacctccgacgcagctcacgaacttcgtagcccgttaacggcgctgaaagtgcaaaccgaagttgcgcagctctctgacgatgatccgcaggcgcggaaaaaagcactgctccaattacattccgggatcgatcgcgctactcgtctggttgatcaactgctcacgctaagccggctggacagtctggataaccttcaggacgtcgcggagatcccgcttgaagatctcctgcaaagcagcgtgatggatatttaccacacggcgcagcaggcgaaaattgacgtgcgactgacactcaatgcccacagcatcaaacgcaccgggcaaccgctattgctaagtttgttggtgcgaaatttgctggataacgccgtgcgctacagtccacagggcagcgtggtagacgtcacgctgaatgctgataatttcatcgtgagggataacggccccggtgtgacaccagaggcactggcgcgaattggcgaacgcttctatcgcccacccggacaaaccgctaccggcagcgggcttgggctaagcattgtccagcgaatcgccaaattgcatggcatgaatgttgaatttgggaatgcggaacaaggtggatttgaggcgaaggtaagctggtaacttctctgtctatgagagccgttaaaacgactctcatagattttattaatagcaaaatataaaccgtccccaaaaaagccaccaaccacaaaccagacaaataccgaggctgaatacatatacccaaaactcgaacatttcccgcataaagagttttcttaagataagaataataagtggcgtaagaagaaaaaatgctgcaatcattgcttgcaatatacgatcttcgccactaacggaaggtatactgcaaatatttcctccgctctcaagcatccagtcatacttattgaaagcaaaaaaagaatctattaaccaataagtaagcattatatatagcaatgcttcaaatattgttttaattttctgctttaacatatatcagtacgctcataaaaatccatttataattatcaacatgacacgttgatactttcatcttttacttattcaaagccatattttcaatccccaaaaaaaccgaaccaaacgtgtaaattattccggtgcgagtaagaattatgaggaatggctatcagtattgtcattttcagaaaatatttatcctgcatcggtgagtcagagtaagatcagacttttgctaaattcgcaaaagactttgcacattttgctaatttcaccgtaccgctctgtgacgtactatagtcggcaaacgtctcaccttgaggttaaaaaatgagcaacatcctgattatcaacggcgcgaaaaaattcgcccactccaatggtcaactgaacgacaccctgaccgaagtcgcggatggcacactgcgcgaccttgggcatgatgtccgcatcgttcgcgccgacagcgactacgatgtcaaagcggaagtacaaaactttctctgggctgatgtggtgatctggcagatgccaggctggtggatgggcgcgccgtggacagtgaaaaaatacattgatgatgtattcaccgaaggtcacgggacgctgtatgccagcgatggtcgtacccgcaaagatccgagcaaaaaatacggttccggcggcctggtacagggcaaaaaatatatgctttctctgacctggaacgcaccaatggaagccttcaccgaaaaagatcagttcttccacggcgttggcgttgacggtgtgtatctgccgttccataaagcaaaccaattcctcggtatggaaccgctgccgacatttatcgctaatgacgtgataaaaatgcctgatgttccccgctatactgaagaatatcgcaagcatcttgtggaaatttttggttaactagagctcaggctttagaaggagttaaccatgcttaccgtaatcgcagaaatccgtactcgtcctggtcaacatcaccgtcaggcggtattggatcagtttgctaaaatcgttccaaccgtactgaaagaagaaggttgccacggctatgcgccaatggtggattgcgcagctggcgtgagtttccagtctatggcaccggattctatcgtgatgattgagcagtgggaaagcatcgcgcatcttgaagcgcatctgcaaaccccgcacatgaaggcgtatagcgaagccgtaaaaggtgacgtgctggagatgaatatccgtattctgcagccagggatttaatcctgccttgtttgcccggccatcctgaccgggcaatgttctttcctttaaacctcaatctccgccatgtcgcctttctcttgcaaccagttgcggcgatcttcgctgcgtttcttcgccagcagcatatccatcatcgcgtcagtacgctgatcgtcttcatcatcgatagtcaactgcaccagacgacgagtgttcggatcaagcgtggtttcgcgcaattgcatcgggttcatttcccccagacctttaaaacgctggacgttcggcttgcctttcttgcgttttaattgctcaagtacgccctctttctcttcttccgtcagcgcgtaataaacctctttcccgagatcaatacggtagagcggtggcagtgcgacgtaaacgtgaccgtgtttcaccaacgcgcggaaatgttttacgaacaaagcgcagagcagcgtggcaatgtgcagaccatcagagtccgcatccgcgaggatacagattttgccataacgaagctggctcagatcgtcgctgtcaggatcgataccgatcgctacgctaatatcgtgcacttcctggctagccagcacttcgtcggaagagacttcccaggtgttaaggatcttacctttcagtggcatgatcgcctgatattcgcgatcgcgcgcctgcttggcagatccgcctgcggagtcaccttccacaaggaacagctcggtacggttaaggtcctgcgcggtacaatcagccagtttgccaagcaacgccgggccgctggtcagctttttacgcaccacttttttggccgcacgcatacggcgctgggcgctggaaatcgccatctccgccagcagttcagccgcctgaacgttctggttcagccacaggataaaggcatctttcaccacgccagaaacgaatgccgcgcattgacggctagagagacgctctttcgtctgcccggcaaactgcggatcctgcatttttacactcagcacataggcgcagcgatcccagatatcttccgcgctcagctttacaccgcgcggcagaatattgcggtattcacagaactcacgcatcgcgtccaacaggccctgacgcagaccattaacatgggtaccgccctgcatcgttgggataaggttgacgtagctttcggtcagcagttcaccgccttccggcagccacagtagcgcccagtccacagcttcagtatcaccagcgaaattaccgataaacggtttttccggcagcgtcggcagaccatttaccgcttccgccaggtaatcattcagaccgtcctgatagcaccagcgttgttcggtattgttgatctcatctttaaaagtgatctcaacgccagggcacaataccgctttggctttcagcacatgcgtcaggcgactaacagaaaatcgcgggctgtcaaagaaggtttcatccggccagaagtgcacactggtaccagtattgcgtttaccgcaagtgccgacaacctgtaaatcctgcaccttttcgccattttcaaaggcgatgttataaacctgaccatcgcggcgcacgttaacttctacgcgcttgctcagggcgttaaccacgctaatccccacgccatgcaggccgccagagaactggtaatttttgttagagaatttaccgcctgcatgcagacggcaaagaatcagttcaaccgccggtacaccctcttccgggtgaatatccaccggcatcccgcgcccatcgtcaataacttctaagctctggtcagcatgtaaaataacgtccacgcgttttgcgtgacccgccagtgcttcatccacactgttatcaatgacttcttgccccaaatggttagggcgagtggtatcggtatacatccccggacggcggcgaaccggctcaagcccggtgagtacctcaatggcatcagcgttataagtttgcgtcatggtttaagttagtaattcgagttgatcgtcagagatggtgcagaccaagaaaatcgacgatcgggttgaaataatcttcgaagcccgtgaatgcgtggttgccgccttctatgacagtctggcggcaggaagcgtagtacgccaccgcctggcggtaatccagcacttcatctcccgtctgttgcagcagccagatcaaatccggcgcttccagcgggtcaatctgcatgactttaagatcgtaaatatggcgactctctagcacatattgctgcccggtgtaggggttctcgttctgaccgagatagtccgtcagcagttcaaacgggcgcaccgccgggtttaccaccactgcgggcagcataaaacattgactcaaccaggtggcgtaatatccccccagactgctaccgacaatacccaggctatcaccgccatgttccaggacaatggattccagcagctctgccgcgtcggaaggatacggcggcaactgcggaatgatcatctcaacgtcagggtgatgttccgccagccagttttttaacaagctcgcttttgcagagcgcgggctgctgttgaaaccgtgtaaataaagaagcgtagacatcagtagccttcactagcggtatcaggttggaaacgtgtgtccgccaggcgatgcacctcggtggtcagcgtgccatcagcatgtaactcgagagtacgccagccgggcgcgatggtatccagcgtaaagttggaacagtgcggcttaaactgcacacaggtgctcggcgttgccagcaggcggcgaccattccagtcgagatccagctcctgatgaatatgaccgcacagcaagtatttgacgtgcggaaacttcgccagcacggtatccagttcgcccgcgttacgcagactgtgttgatcgagccaactacaacccgcaggtagcggatgatgatgcagcagcagcaacgtatggcgttctggcgcatcggccagtttacgttccagccactcaagctgaaactcgctcagctcaccgtgcggcacgccaaacacctggctatccagcaacaggatttgccattgctcaccaataaacacgcgcttcgccggggagatacccgcatcctgtaacgcgctgtacatcgcgggctggaaatcgtggttgcccggcagccagacgcagggcgcacgaaaacttgcgatgccttcagcgaaatgctgataggccgcagaggattgatcctgcgctaaatcacctgtcgcgacaatcaggtcgaattcgtgctggtgtggccgaatcgcctccagcaccgcctggtaactctcccaggtgtttacccctaacagggcttcgtgcttttgtgcaaacaggtgagtgtcggtaatttgtaaaatcctgactctggcctcaccagccagaggaagggttaacaggctttccaaatggtgtccttaggtttcacgacgttaataaaccggaatcgccatcgctccatgtgctaaacagtatcgcaaccagtccgctaaaaactgattaatttgatgcttttcgtcgcgttgatgcaactttttattaggataatcataccgcgctttgaagcgaaaaatctgctggctactacacacttcagccaccatcgcgtcatgatacagacgcaccgtcatactcggaaggctccagtaactgatcgcgggcgcagtctgttctattgtcaccagggtagtgtatcgggtgctttccacaatcgtcagccgatattgtgcgtttgccacctgatagcttacagtttcgccgggtgcgtcattgcgcggtaacaaacggcgcaattgactaaagttcatctcgcacaggcgcatcatttcaggaaagtcaggtgtgtaacgcttcatttatgcccactcattttttaacgcttgatgatgcagctgcagccattgcaaagcgatgacgctcgctgcgttgtcgattttcccctcttctacccactggtatgcctgttcccggcttaccacatgaacgcgaatatcttcgttttcatcagccagaccgtgaataccgcttgcggtcgtggcgtccacttcgcccaccataatactgctacgctcactggtgccccccgggcttgccaggaaacttaacaccggtttggtccgtttgactatcagtcccgcctcttcaatcgcttcgcgacgggcaacatcttccacactttcaccctcttcaatcatcccggcaaccatctccagtagccaaggggtttcgctggtgtcgtacgcggcaatccgaatctgctcaatcagcacaacttcatcacgcactgggtcaaagggtagcaagactgcggcgtgaccgcgctcaaaaatttcccgccgcacctcatgactcatttgcccgttgaatagacgatgacgaaatctataaagatctaaactaaaaaagccgcgataaagtgtttctcgtgcaataatttctacatcgtttttgccaaatgtaacgggcaggttgtctggcttaagcattgttaatgtcctggcactaatagtgaattaaatgtgaatttcagcgacgtttgactgccgtttgagcagtcatgtgttaaattgaggcacattaacgccctatggcacgtaacgccaaccttttgcggtagcggcttctgctagaatccgcaataattttacagtttgatcgcgctaaatactgcttcaccacaaggaatgcaaatgaagaaattgctccccattcttatcggcctgagcctttctgggttcagtagcttgagccaggccgagaacctgatgcaagtttatcagcaagcacgccttagtaacccggaattgcgtaagtctgccgccgatcgtgatgctgcctttgaaaaaattaatgaagcgcgcagtccattactgccacagctaggtttaggtgcagattacacctatagcaacggctaccgcgacgcgaacggcatcaactctaacgcgaccagtgcgtccttgcagttaactcaatccatttttgatatgagcaaatggcgtgcgttaacgctgcaggaaaaagcagcagggattcaggacgtcacgtatcagaccgatcagcaaaccttgatcctcaacaccgcgaccgcttatttcaacgtgttgaatgctattgacgttctttcctatacacaggcacaaaaagaagcgatctaccgtcaattagatcaaaccacccaacgttttaacgtgggcctggtagcgatcaccgacgtgcagaacgcccgcgcacagtacgataccgtgctggcgaacgaagtgaccgcacgtaataaccttgataacgcggtagagcagctgcgccagatcaccggtaactactatccggaactggctgcgctgaatgtcgaaaactttaaaaccgacaaaccacagccggttaacgcgctgctgaaagaagccgaaaaacgcaacctgagcctgttacaggcacgcttgagccaggacctggcgcgcgagcaaattcgccaggcgcaggatggtcacttaccgactctggatttaacggcttctaccgggatttctgacacctcttatagcggtagcaaaacccgtggtgccgctggtacccagtatgacgatagcaatatgggccagaacaaagttggcctgagcttcagcctgccgatttatcagggcggaatggttaacagccaggtgaaacaggcacagtacaactttgtcggtgccagcgagcaactggaaagtgcccatcgtagcgtcgtgcagaccgtgcgttcctccttcaacaacattaatgcatctatcagtagcattaacgcctacaaacaagccgtagtttccgctcaaagcagtttagacgcgatggaagcgggctacagcgtcggtacgcgtaccattgttgatgtgttggatgcgaccaccacgttgtacaacgccaagcaagagctggcgaatgcgcgttataactacctgattaatcagctgaatattaagagtgctctgggtacgttgaacgagcaggatctgctggcactgaacaatgcgctgagcaaaccggtttccactaatccggaaaacgttgcaccgcaaacgccggaacagaatgctattgctgatggttatgcgcctgatagcccggcaccagtcgttcagcaaacatccgcacgcactaccaccagtaacggtcataaccctttccgtaactgatgacgacgacggggcttcggccccgtctgaacgtaaggcaacgtaaagatacgggttatctgccgcattcttcccccttcagccttcaatttcgaccagccatcctctattctgatgggtatttaccactggtcccggaagacaaaaatgaaacggacaaaatccatacgccacgcatcgttccgcaaaaactggagcgcacgccatctgacaccagtcgctctcgcggttgccactgtttttatgctggctggctgtgaaaagagtgatgaaacagtgtctctctatcaaaatgctgacgactgtagtgctgcaaacccaggcaaaagcgccgaatgtaccaccgcgtacaacaatgcgctgaaagaagccgaacgtactgcgccgaaatacgccacccgtgaagactgtgttgctgaatttggtgaaggtcagtgccagcaggcaccagcccaggctggcatggcaccagaaaaccaggcgcaggcccagcaatccagcgggagtttctggatgccgctgatggccggttacatgatggggcgtctgatgggcggcggcgcgggatttgcacagcagccgctgttctccagcaaaaacccagccagtccggcttacggtaaatataccgacgcgacgggtaaaaactatggcgcagcccagccaggccgcaccatgaccgtaccgaagacggcaatggcaccaaaaccggcgaccaccactaccgttacccgtggcggttttggtgaatctgttgccaaacaaagcactatgcagcgtagtgcaaccggtacctcttctcgtagtatgggtggctgataccgatggaaagagtcagtattaccgagcgcccggactggcgtgagaaagcccacgaatacggtttcaattttcacaccatgtacggcgagccgtactggtgtgaagatgcttactacaagttgaccctcgcccaggttgaaaagctggaagaagtcaccgccgaactgcaccagatgtgcctgaaagtggtggaaaaagtgatcgccagcgatgagctgatgaccaaattccgcattccaaaacacacctggagttttgtgcgccagagttggctgacgcaccagccaagcctttatagccgtcttgatctggcgtgggatggcactggtgaacctaaacttctggaaaataacgccgatacgccaacgagtctatacgaggcggcgttctttcagtggatctggctggaagatcagcttaacgccggtaacttgccggagggcagcgaccagtttaacagtctgcaagaaaaactgatcgatcgcttcgttgagctgcgtgaacagtatggcttccagttgctgcatctcacctgctgtcgcgacacggtggaagatcgcggaaccattcagtatttgcaggactgcgcaacggaagctgaaattgctactgagttcctctacatcgatgatatcgggttaggtgaaaaaggtcagttcacggatttacaggatcaggtaatttccaacctgttcaaactgtatccgtgggaatttatgttgcgtgagatgttcagtaccaagctggaggatgcaggcgtacgctggctggaaccggcgtggaagagcattatctccaacaaggcacttctaccgctactgtgggagatgttcccgaatcacccgaacctgctgcccgcttattttgcggaagatgatcatccgcaaatggaaaaatatgtggttaaaccgatcttctcccgtgaaggcgcaaacgtgagcatcattgagaacggcaaaaccattgaagcagcggaaggtccgtatggcgaagaagggatgattgttcagcaattccacccgttaccgaaattcggcgacagctatatgctgattggtagctggctggtgaacgatcaacccgccggaattggcattcgtgaagaccgtgcattgatcacccaggatatgtctcggttttatccacatatttttgttgaataagccacgataccggatggcactcgccatccggtaattgttagcctatctgcacgctcagcatactcaggctgcccatttctataccctcaaccggaatggtaattggctcctgcccatcccacgcacctaacacatacaacaacggcaaataatgctctggcgttgggttgcttaacgtgccaccttcatggtcgaggtaattcaccagaggatgttgttccactggcccttgccacgtcagattcgctttcacatactcattaaagctcgtcgcccacggatacggactactatcaccgtgccacttcactgtgcgcaggttatgcaccacgttaccgctggcgaccaacattattccttcatctcgcagcgctgccagtttgcgccccatttcgaaatgccaggcggcaggtttgctactgtcgatactcaactgcaccatcgggatatcagcgtcaggatacatcttaatcagcacgccccagctgccgtggtcaaagccccaggcttctttatccagcgtcaccgggatcggcgctaacagctcaaccagacgctgtgccagcgcagggctacccggagcaggataatgcgtatcgtacagcgcctgcgggaagccaccaaagtcatgaatcgtgggcggcgtctccatcgcggtcactcctgttccacgggtaaaccagtgagcgctaaccaccacaatcgcttgcgggcgtggcaatgtcatccccaacttctgccagctgcgggtatacaaattatcttccagcacgttcatcggactaccgtgacctaaaaacaatgctggcatacgtgtactagacatgatgatatccttaactaaaggtgtcattttgatatcctcacaatacgcttgttcggcggagtaagaacccggataacaatgatgatgatcatcagttattttgacgatctgcctgaaggtgaagatttataaggagttgtcgatgagtgtacctctcattctgaccatactggcgggggcagccacgtttattggcgcgtttctcggcgttctcgggcaaaaacccagcaaccgcttactggcgtttagcctaggttttgcggcggggatcatgttgctcatcagtttaatggaaatgcttcctgccgcactagcagctgaaggaatgagccctgtgttgggttatggaatgtttatcttcggtctgcttggctattttggcctggaccgcatgttgccacatgctcatccgcaggatttaatgcaaaaaagcgtgcagccgttgccaaaaagcatcaagcgcacagccattctgctcactctcggcatcagtctgcataacttcccggaagggattgccacctttgtcacggcgagcagcaacctggagctgggatttggcatcgcactggccgtcgcgttgcacaatatccctgaaggtctggcagtggcaggcccggtttatgcggcaacggggtctaaacgcaccgcgattctgtgggcggggatttctggactagcagaaattcttggtggtgtgctggcgtggttaatcctcggtagcatgatttccccggtggtcatggcggcaatcatggcggcggttgcaggaattatggtggcgctcagcgttgatgaattaatgccgctcgccaaagagattgaccctaataataaccccagctatggcgtactatgtggaatgagtgtgatgggattcagtttagtgctgctacaaacggcgggaattggttaaaaacaacatcagaagttgtccagcgcatggacaacttctgccagcttcacgaaagccttattctaccttttcggctgtctcttctctcgtactgtttaagtatttgttccgcgcttcaagcagtgcgtctctgtcctggcgaaacgcccgacaataacgtttcaaatgcaggaaataacccaccacaaccagagcaatcaatacaatccagtaccaggcgataaacatccttttacccttaatatttaacaatactaaacatttagcgtataaatttcacatatcctttttcggatatattcatatggtcgcataataacggaacaattatatgattttgatcataatgaaaaagaatgcctgatattaatgaaattttctcatagaaagagaagcggaattaacatcttgcatagcagggaaaaataaaaaccgaagcctgctacaacttcggtttcttgattaaggcagtaaattaagcagcggttttcagctggctttacgctcatgtgcctgacggtatgccaccaggtcttcaatagtcacgagcgccatattgtgtttattggcaaactcaatacactctggtgcacgcgccatcgtgccatcgtcattagtcagctcacacagtacaccagccggtttaaagcctgccagcgtcatcagatcaatagttgcttcagtatgaccgccacgcgtcagtacaccacctgcctgagcgcgaagtgggaaaacgtggccaggacgattcagatcactcggttttgcgccatcggcaatcgctgcgcgaacggtcgtaatacggtcagcggcagaaacaccggtagtcacaccttcagctgcttcaatggtcacggtaaaaccggtgccataggcgctggtgttattttctaccatcattggcagatcgagttgtttacggcgatcttcagtaatgcacaggcaaacaataccgctaccgtggcgaatggtcagcgccatctgctcaacagtcatggtttctgccgggaagatcatatcaccttcgttttcacggtcttcatcatcaagcaccattacaccgcgtccttcacgcagcgcagccagtgcattttcaacacgttcgaaaggcgtaccaaaagaggaaagtagcgtctgattcatggtaaaaaaacctcactaaaattatggttaccagaatcagggcagtcttaggagtggcggcatatagccaaaataacgtgagcgggtccatgcccgacagaatcgttactctctcccatccggactctaaccgtcggccccggaattacaccggatctgctgtcctttgagttcgcacccaaagcgctcgcgggctttcaactgagttgatttaccgccggtggggaatttcgccccgccctgagaataagcggattcactataacgctaatgattagcggcagcaacgcatagcttcacataattctggtttatatctaatacaaacactaaaacgggccatcaggcccgttatatcagtgctctaactccagctctcttgcctgcatcatctgttgacaataccaggcataacgtgcgcaaaaccaggttctatgttcttcatccatgttaccagtaacggccagaatatcgaccgggcgaccttctgcgtgcattctggcaaaactacgcgccaggaaatcgaaattatttaaagaattaagactatgatccataagcacatcctccggttatcgcataccttttaaggccatatgctttttctgatttcagtattccccaatcagtgtagtgcctttaaacataacgtgcgtaaatatattgtccccgatcacactttttagtgaaaaataaaaaaccatattaaaagactttctcttccagaacttctctaacctgtgttattattaacacagataaatgtaagcaaggaaactattacaaagtaaatattgcgtcactaaatggacattggagtgatatatgattttattcgccgactataacaccccttatcttttcgctatttcctttgtactgttgatcggcctgttagaaatttttgcgcttatctgcggtcacatgctctccggtgctcttgatgcacatcttgaccattatgattctataaccacaggtcatattagccaggcacttcattatctcaatattggaagattgccagctctcgtcgttctctgcttactggctggtttttttggtcttattggcatcctgttgcagcatgcctgcatcatggtctggcaaagtccactgagcaacctgttcgtggttcctgtcagtttactgtttacgattattgcggtgcattataccggtaaaatagttgcgccctggattccacgcgaccatagtagtgctattacagaagaagaatatattggtagcatggcgttaattaccggtcatcaagccactagtggtaatccctgcgaaggaaaactcaccgatcaatttggccaaatacattatttactactggagcctgaagaaggaaaaattttcactaaaggagacaaagtgttaattatttgccgactttctgcaacgcgatatttggcggaaaataatccctggccccaaatattgtaatttattaatcaaaaggaaatttaataatggatgatattgttaattctgtgccctcctggatgtttaccgcaattattgccgtatgcattctgtttattattggaattattttcgccaggctctatcgtcgcgctagcgcagagcaagcttttgttcgtactggtttaggtgggcaaaaagtggtaatgagcggtggcgcaatcgtgatgccgatctttcatgaaataatccccatcaatatgaatactctgaagctggaagtcagccgcagtaccattgatagcctgattacgaaagatcgtatgcgcgtcgatgtagtagtcgctttctttgtgcgggtaaaacctagtgtagaagggattgccaccgctgcccagacgctggggcaacgcaccctgagccctgaagacttacgtatgttggttgaagataaatttgtcgatgccctccgtgcaacagctgcgcaaatgaccatgcatgagttacaggatacccgcgagaactttgtgcagggggtgcaaaatacagtggcagaagacctgagcaaaaacggtctggaactggagagcgttagtcttaccaactttaaccagaccagcaaagaacatttcaatccgaacaatgcctttgacgccgaaggtttaaccaaactgactcaggaaacagagcgccgtcgccgcgaacgtaacgaagttgaacaggatgtagaagttgcggtgcgtgaaaaaaatcgcgatgcgctaagccgcaagctggagattgaacagcaagaagcgtttatgacgcttgagcaggagcagcaggttaaaacccgtactgccgaacagaatgcacgtattgcggcttttgaagctgaacgtcgtcgtgaagcagagcagacacgaattctggctgaacgacagattcaggaaacagaaatcgaccgcgaacaggccgtccgcagtagaaaggttgaagctgaacgtgaagttcgcattaaagagatcgaacagcagcaggtcaccgaaatcgctaaccagacgaaaagcatcgctattgccgccaaaagcgaacaacagtcccaggcagaagcgcgtgctaatctcgcacttgcagaagcggtaagcgcccaacaaaacgtagaaaccactcgccagactgccgaagccgatcgtgctaaacaagttgccctaatcgctgccgcgcaggatgcagaaaccaaagcggttgaactgaccgtgcgggcgaaagcagaaaaagaagccgcagagatgcaggcggcggctatcgttgagttagccgaagctacacgtaaaaagggtctggcggaagcagaagcacaacgtgcgctgaacgatgctatcaacgtactttctgatgaacaaaccagccttaaattcaaactggccttgttgcaggcgctgcctgcggtaatagagaaatccgttgagccgatgaagagtatcgacggtatcaagattattcaggtcgatggtctgaatcgtggcggcgctgcgggtgatgcaaacacgggtaatgtggggggcggaaacctggcggaacaagcattaagtgccgctctctcttaccgcacacaggcaccgctgattgactccttgctcaatgaaattggcgttagtggcggcagtctggcggcattgactagtcccttaaccagtacaactcccgtcgaagaaaaagcagagtaaaccctcttccaggaataatccctggcccaaaaagccggggattttttatatctgcgttccgctaaaaagtgcaaatgatcaggttgttgcagcattttgcgtgacggctcggggaaggcaaaactgcatcagagaaagcattgcgtggggtctggcgctcatcaacaatcggggagtcagcagggggctgaaacgggaaagcccctcccgaagaagggggccttacagaaggaaagggttatgatgaagctcgtcatcatactgattgtgttgttactcgtaagtttcgcagcttattaacagccaatcagaggggggagaaatcctccctcacccttgttcctttactttaggttgaaaaaaaatcagcgtcaagaaggtttcattaacacatatccctggcccaaaaagccggggattttttatatctgcgttccgctaaaaggtgcaaatgctcaggacgttgcagcgttttgcgtgaccgctcggggaaggcaaaattgcctctgggaaagcattgcgcggggtccggcgctcatcaacaatcggggggcagcaaggggctgaaacgggaaagcccctcccgaagaaggggccttgtataaggaaagggttatgatgaagctcgtcatcatactggttgtgttgttactgttaagtttcccgacttactaacaactcatcagaggggggagaaatcctcccttacccttgttcctttactctaggttgaaaaaacaacagcgtcaataggcctgccatgtacgaagcgagatctgtgaaccgctttccggttagccttttttatcctgttggatcttcttgatgatgttggtcgtgctgcaaccgtcttcaaagttgagcaccaacacttcgccaccgttggcccagacttctttactcccggcaatctcttctggtttatagtcgccgcctttcaccagcagatctggcaagatcccggcgatcaagcgctgcggcgtgtcctcttcaaagctcactacccagtcgaccgcttccagtgcgcccagcacaatcatacgctgttcgagtgggtttaccgggcgggaatcccctttcagccgtttggtggaggcatcgctgttgacggcaacaatcaagcggtcacccagcttgcgggcatttgccagataagagacgtgcccggcgtgcaggatgtcaaagacaccgttggtcatcaccactttttcaccacgtttacgcgctgccgctacggccagcttcagttcctcttcggtcatcacgccaaagcctgtatctgcacgtccacgtacagcattttccagctcgatcgggctaaccgtggaggttcccagtttgccgaccaccacgccagccgccgcattggcaaagaagcaggcttcttccaggctattacccgctgccagcgttgccgccaggacgccaatcaccgtgtcgcccgcaccggtaacgtcatacacttcctgcgcttgggttggcatatgcagcggcgctttacccggttgcagcaggctcataccctgttcggaacgggtcactaacagagcgctgagttcgtaatcggcaatcagtttcatgccgcgctcaacaatctcttcttcggtcttacatttaccgacaacagcttcaaattcgctgagattcggcgttaacagcgtagcgccgcggtagcgctcaaaatcggtaccttttggatcaatcagcaccggaacacccgctttacgcgccagttggatcatctgctgtacgcttgccagcgcacctttggcgtagtcagaaagcaccagcgcgccaatgctactcagcgcctgattaatccgctcgtgcagcggctgcggatcaacaccttcgaaaccttcttcaaaatccagacggatcagctgttggttgcgggaaagtacccgtaatttggtaatggtcggatgcgtcggtacagaaacgaagtcgcatttgacgttgacgtcggccagagatttactcagcgcgcgcgctgcatcgtcaatgcccgtcaacccgaccaggcgtgcattagcaccgagagaagcgatattcatcgccacgttagccgcgccgcccggacgttcttcgatggtattcactttaaccacgggcaccggcgcttccgggctgatacgactggtggggccgtaccagtaacgatccagcatcacatcaccaaccaccatcactcctgcacgttcaaactctggcagcgttactttcattcctgtctcctgagagattcaaaatttgcgcgcgataataccatacttcattcttccaccagccacttctgccagcttgcccgcaccagttcacgctctgcggtgaagcaatcctcgctcacatggcccggcaattcctgtaatgccagatgatgaagttcatcgcgaagcgtagtgtaagcacgggtcagcgccatcgcttcctgctcttccataatgtcgttttgcgccagtagttccagaatacgcacgttgtcactccagcgcgttaacttcggtttttcatgagcgtagcgcaacaccagatattgggtaataaattcgatatcggtaattcccccttcatcagctttgatatcaaagcgatcgcgatgtttattgccgagatgagcgcgcattttctcgcgcatttcccgcacttccgtttgcagagttttaccttcacgcggcagcgtcataatctcgcgacgcactgcgtcaaagtgcgcggtgagctgcggatcgccgtacactacacgcgcacgcaccagcgcctgatgttcccacgtccaggcctcgtttttctgataatcggcaaatgcttctgcggatgtcaccagcattcccgccgccccggacggacgcagtcgagcatccacttcatacaaaatgccggaagaggtacgcgtactgaacagatgcataatgcgttgcgccagacgcagataaaactgccgcccgtcgatttcccgctcaccgtcagtcatcgcatccattgggcaatcatggaggaagataaggtcaagatcggaactgtagcctaactcccagccgcccagcttgccgtagccgaccaccgcaaaaccacgcccttcgcgttcgttcaggtgattcggcttaccgtagcgggcaaccatttgaacccacgcctgctgaacgacggcatctatcatggcttccgccagccaggttaagtgatcgctcactttcatcaccggtagcgtaccggcgatatccgctgcggcgatgcgtaacagctgcgcctgtttgaactgacgcagcgcctcaagctgttgctcttcgtcatcttccggcacgcgcagcaaatactggcgcaactcatcgcggtaggcatcggtcgccgtcggctggtaaagggtgtttggatcgagcaattcatccagcaataatggataacgcgccagctggctggcaatcatcgggctcgcggcacacagagaaatcaaatgtttaagcgccgcggggaattcactgagcaattctaaataggtggtgcgggtaacaatccccaccagcaaggcggtaatgcggctcagcgtaacggcagcgtcttcacgcgcacagacatcacttagcagatgcggcatcagatggtcgagcacctgacgtcctcgcggcccgatggtgcgcttatccagctctttgcggaaatcggcaatcagcgttagcacctgtttgcgatcatcctcgctaagatgcgccagcactggcgtagtgtcatcttcctgcaacgcatcctgccacagctcacgccactgttcgctcaggctctcttcctgagtttcactttcatcgtcgccaatcaattcattaaacacccggcgcacattggtcatatgtgcggtcagcgccccggtcagttgcggccagtcagcaaagtccatcgcccacgccagccgcgcacgattaagctcatcagaaggaagcgtctgggtttgttcgtcgttaatgctttgcagcaggttttccagacgccgcaggaacagatacgccactcgcaattgttcagcatcgttttcagaaagcagatgcagctcggcaatggcgctgagcgttggcagtaaagagcggctttgcaggctcggttcgcgtccgccgcgaatgagctggaacacctgaacgataaattcaatttcgcgaatgccgcctgcgccgagtttgatattgtcggtcaaaccacgtcgacgcacttcacgggcaatcatccctttcatgttgcgcaggctctgaatcacgctgaaatcgatgtaacgacggaaaacaaacgggcgcagcatcgcacgcaactcgttagcatagacgccttcgctatcgcccataatccgcgccttgaccatcgcgtaacgctcccagtcgcgcccctgctcctggtaataatcttccaacgcggcaaagctcagcaccagcgggccactttcgccaaacggacgcagccgcatatccacgcgatagacgaagccatcctgcgttggttgatccagcactttaatcagccgctgccccatgcgggtaaaaaactgcgcgttatccagttcccggcgtccaccctgcgtacaaccatgttccggccaggcaaaaatcagatcgatatcagaggagaaattcagctccccaccgcccagcttacccatgcctaaaatcagcagcggttgcgcttcgccctgcgcattgcacggcgttccccactcgcggcagcaggcgtcatacagccagtcacgcgccgcaacaatcagcgtctccgccagatagctgagctgctgcaatatgctctcttcagtaaccagtgccagcgtttgcgcccaggcgatgcgcaccataatgcgccgccggaatagccgcagctcgcgcattaacccggcttcgtcactcacattacagagcgcctcctgcaaccatgccgcgtaatgctgccattcgtcggcctgcggcggttggctttccagttccgtcagccactctggatgcgcaatcacgctgtcctgcacaaaatcactaaaagtaagtacactcttcgcctgtgcgctaagactttcctcggctaaaggctctggcagccgctcaacaacggtctgccagtactgctgtaacggactagagagcggcttcataagcgattttatccttgcctgattaacgttttccgctgtgcaaccagaacggttcctgattgtttgcctcattacggaaatgttcaatttcgatgcgttgcccggtcgcaatagcgtgatgcagcccctgccagttctccagccaggcttgcgcgacgacaggatcatagtaacccgccagcaacagtatactgtcaatatcacgcgtcaggcgtggcaactggtcacggtagcgatcgcctaacggctggcagaaaacgcttttcagttcagcggcatggcgggaaagatggatatcggcaaagcgtttgaaggagtcgctgattttgccctgcgctttggcatctaaaaatggctgccatgctttgcttaccaaccattcggtcaacgccagcttcgccattgccgtttcggtagagtagaccgccgtcacggcagacaccgcagaagcaatggtcgcctcgcattgagtcagcagatcacgtaagtgagtgctcgctttacgcggcacaataccaccgaacagcatcagcgtatgacggaccaggctaatggctgccagcacctgttctttcgccgcatcgttgccgcgtacccacagttcttcatgatactgccattgcgctaacgccagctcgagcgccgcttccagcccctgttccacatcggcttttgccgcaacatgcaaaatggtggtcggtttgatttcacgcgccggattgccctgcgccagatgatagccacgcgccgctttgctcaggctgccctggcgtaatccggtttggcttaccagttggttcgccagtttcagcaccgcgcgcgtgtcgccgctaagcagttccagttccagctcacagataggttcagcaaattcacccgctttcacttccccctggtcgagggcgatttcaatttggctaccatcgaccgccaccagccatttttcgcgataaaaatcggtgctgaacagcggctgcacgcgggaggcgagatcggcgggcaattcgccgttcggccagacttccgtcggtaactgcgccaggtcgagcgtcggttcgctcaacgccacgttatattccgggcgctgatgtaagccgcctgtcactcttcctgcaactttcatggtcatctcatagcgaccgttttcgccacgaatacgtaagcccatatcgtgcccacgcagccagttatccggcgtttcgtagtaaatattcagcaactgcacggggtcatggtgctcgccgcccagcgtattgagatggtcacgcaacgcctcaacggcactgtgattaacaataaactttaattcgatttcctgagccatggcctttacttatcggttatgtcacataagtgacgatgaacggcgaacttaatgcgatcttttttgtcagtagatagtattttgcgccaaattgccatgcaacgggcaatttgacgggcgtaaaagtttgaagcagtggcaagacctgacacagaggattccgattgatgtcgaatgctttgcgtagcgacactgatgccactactatcgttccactttccatgacaataacgacagcctgatgccaaaattacgcctgatcggattaactttactcgcacttagcgcgactgccgtcagtcacgctgaagaaacgcgctatgtttccgacgaactgaatacctgggtccgcagcggtccgggagatcattatcgcctcgtgggcacggttaacgccggcgaggaagtgaccttattacaaactgacgccaacaccaattatgcccaggtgaaagacagctctggccgtaccgcctggatcccgttgaaacaacttagcactgagccaagcctgcgctcccgtgtgccagatctggaaaatcaggtcaaaaccctgaccgataaactcaccaatatcgataacacctggaatcagcgcaccgcagaaatgcagcaaaaagtggcgcagagcgacagcgtgatcaacgggttaaaagaagaaaatcagaaactgaaaaacgagctgattgtcgcgcagaaaaaggtcgatgccgccagcgtacagctggatgacaaacagcgcaccatcatcatgcaatggtttatgtatggcggtggcgtgctggggcttggcttgctgctcggtctggtactgccgcacctgatcccaagccgcaaacgcaaagatcgctggatgaactaaatcgccttcttcgttgcactgtcttattattaggaattgtgtatttgacgaagggatgatggcgtgaagatttatctggtcggtggtgctgttcgggatgcattgttagggctaccggtcaaagacagagattgggtggtggtcggcagtacgccacaggagatgctcgacgcgggctaccagcaggtaggccgcgattttcctgtgtttctgcatccgcaaacgcatgaagagtatgcgctggcacgtaccgaacggaaatccggttccggttacaccggttttacttgctatgccgcaccggatgtcacgctggaagatgatcttaagcgtcgcgatctgaccattaatgcgctggcccaggacgataacggcgagattatcgacccgtacaacggtctgggcgatctgcaaaatcgtctgttgcgccatgtttcccccgcttttggcgaagatccgttacgcgtattgcgcgtggcgcgttttgctgcgcgttatgcccacctcggttttcgtattgccgatgaaactctggcgttgatgcgcgagatgacccatgcgggtgaactggaacacctgacgcctgaacgggtatggaaagagacggaaagcgccctcaccacccgcaatccacaggtgttcttccaggtactgcgcgattgcggcgcactgcgcgttttattcccggaaattgacgcactgtttggcgttccggcccctgccaagtggcatccggaaatcgatacgggtattcataccttaatgacgctcagtatggcggcgatgctgagtccgcaggtcgatgtccgtttcgcaactttatgccacgatctcggtaaagggctgacgccgccagaactctggccgcgtcatcatggtcatggcccggcgggtgttaagttagtggaacaactatgccagcgtctgcgcgtgccaaatgaaattcgcgatttagccagactggtggctgagtttcacgatctcatccacaccttcccaatgctgaacccaaaaaccatcgtcaaattatttgattccatcgatgcctggcgtaaaccgcagcgtgtcgagcaactggcgctgaccagcgaggctgacgtgcgcggcagaaccggttttgaaagtgcggactacccgcaaggccgctggttgcgcgaagcctgggaagtggcgcagagtgtgccgacaaaagccgtcgttgaagcgggatttaaaggtgtggagattcgcgaggagctgacccgacggcggattgcggcggtagccagctggaaggaacaacgttgcccaaagcctgaatgagtattgggcattttgccggatgcggcgtaaacgccttatccggctacatgtcaacgacagttgtaggcctgataagacgcgcaagcgtcgcatcaggcgttgattgccggatgcggcgtgaacgccttattcggcctacgcaatcgttgacaacgccaagcatccgacactattcctcaattaaaagaacacgacatacaccgcagccgccacaataaagcgataaatggcgaacgggataaagctaatgcgcttaatcaattgcaggaaggttttaatcgctatcagcgccaccacaaaagcggtgataaacccaacggcaaacatcgggatatcgccgcttgtcaggaagccccagcttttgtagagatcgagcgccgttgcgcccatcatcatcggcaccgccagcaggaagctaaactcggaagcagcgtaacggctcacccccatcagcatcccaccactaatggtcgccccggaacgggagaaacccggccacagcgccagacactggaaacagccaatcataaatgcctgacgataggtcatatcatcaagacccggcgcacgcggctctttcggcttcaggcattcggcggcaatcagcaacaaaccgccaacgaccagcgcatacatcacatttatcgggttaaacaaactcttaatcgtgtcgtggaacaacagccccaataccaccgccggaatcatccccagcaaaatgtggatcagcgttaaacgacctttgctttcaccttcgtgctgcaacgggcggccaaagtggatgccaatcaggccaaacagacgccgccagaacatcactactaccgccagaatacttcctaactggatcacaacttcaaaggttttcgccgtgtcgccctcaaaccccaacaagtgaccgacaataatcatatggcccgtgctggataccggcagaaattctgtcaatccttcgaccacacccaatattgccgctatcagcaggctgtgcatatcgctcatcaataaacccctaaattattaaaatgtaccgcttgtccgaactactgcgtatgaccaggttataaccgtttggtttaacagctgtaaaattaattattttctttcagattattgccacgctcaatgattacgccaacattcgccgcccgcgccactgcgcctggcttgctgagtttgatacgcacccacgggctgttgaagcgtgctaacagcagctccgccacctcttcagccacgcgttccaccagcgcaaaacgcgccccctcgacgtggctgaccaccgtttctgcaatgtcagcgtaactgaggcaatccgccacatcatcacttttcgccgctttacggttatcccacgccatttcgatatcgaacactaacttctgttcgatggtctgttcccagtcgtaaacaccaatagtggtgattacgctaagttgctctataaatacaatatccatcacgtcctgcctgctttttggctaaccggataccacttccggcgaaatgtgcgtattatccacagattcatcgttgaacacgaattttcaaaacggaacagcttatgagtgcaatcgcgcctggaatgatcctcatcgcgtacctctgcggctccatttccagtgccattctggtttgccgcttgtgtgggctgcccgatccgcgaaccagcggctccggcaatccaggcgcaaccaatgtgttacgtatcggtggcaagggagcagccgtagcagtactgattttcgacgttctgaaaggaatgttgcccgtctggggcgcgtatgaattaggtgtcagccccttctggctaggcttaattgccatcgccgcctgtcttggacacatctggcccgttttcttcggatttaaaggaggaaaaggcgttgctaccgcttttggtgccatcgcacccattggctgggatctcaccggagtaatggcgggaacctggttactgaccgtgctattgagcggatacagcagcctgggagcgattgtcagtgcactgattgctccgttttatgtctggtggtttaagccacaattcaccttcccggttagcatgctctcttgcctgatcctgctgcgtcatcatgacaacatccaacgtctgtggcgtcgtcaggagacaaaaatctggacgaaattcaaaagaaagcgcgaaaaggatcccgagtgatttctggtggatttacatgacctgatagccttcatcgggcttgcccagccgttgctggcaccatgccgccagaaattccacgcagacacgtaatttcatgctgcgatagagcggctcccggtaaacagcccagatattggcgctttgtgcatactctggcaatacttgcaccagtttgccactctccagaaacggcaacacatcccactcggaacgcagcataatccctttaccctccagcgcccattgcagcacaatctcgccgctattggaggaaagatgcccgcttaccttcacgctttttttctcctgaccgttccccaactcccatattccatgggtcatatcgcgctctttggtcaccagacagtcatgacgacttaattcctgtagggattgtggctgcggatatttttgcagatactcaggtgctgcgcataatattcttttattttttgtcaaaagatgcgcaatataataatcaggaatttcgtcattaatacgaatatccagatcaatattatcctgcactaaatcaatttgccgatcgaacaattcaaaatgcacctgtaactcaggataattgcgcatcagttcggtaatagctggcgcaatatggctgcgcccaaaaccaaaactgcaaccaatacgaatcatcccctccgggcgcgttttgatttgcgtgacgtcatcgaccagtcgctgatattgggtgaggatttccaacgcatgttcgtaacaacgttggccactttcagtcagcgccacgccgcgagcggagcggttcagcagcgttgttgccagcgtattttcaaggatttggatccgcttggtgacaaatgcaggcgtctgcccaagcgtcgccgctgcggcgctaaaactcccgctgtgaacgatttctaccagtacctgcaagtctttggctaaaggccagctattcagcatcgttaattatccgcagttgtgataagcgcagtgtatttcgcaaaacattgccattccctgctctggcgcaatattcattcttattttcgcgttgattcacgaactgttaattacatattcacggtggcaaaaaatataaaaccacatttttagtggtagtttgtggcggtgaatttttccagacaaatacaaaaactggagttgccatgatgagcgaaagtaataagcaacaggcagtgaataagttgacagagattgtcgctaactttaccgccatgatttctacccgaatgcctgatgacgtggtggataaactaaaacagctaaaggatgccgaaacgagcagcatggggaaaattatctaccatacgatgttcgacaacatgcaaaaagcgattgacctgaatcgtcctgcctgtcaggacaccggggagattatgttcttcgttaaagtcggttcccgcttcccactgcttggcgagctgcaaagcatactcaaacaagccgtggaagaggcaaccgtcaaagcgccactacgtcacaatgcggtagaaatttttgacgaagtaaacaccggcaaaaataccggtagcggcgtaccgtgggtcacctgggacatcatccccgacaatgacgatgcggaaatcgaagtttacatggcaggcggcggctgcacgctacctggccgcagcaaagtgttaatgccgagtgaaggctacgaaggcgtggtgaaattcgtcttcgaaaatatctccaccctcgccgtaaacgcctgtccaccggtactggtgggcgtgggcatcgccaccagcgtggaaaccgccgccgtactcagccgtaaagccattttgcgcccgattggcagccgccatcccaatccaaaagcggcagaactggagctacgcctggaagaaggactcaaccgtctggggattggtccacaagggctgaccggcaacagtagtgtgatgggcgtacatatcgaatctgccgcccgccatccgagtaccatcggcgttgctgtctctaccggctgctgggcgcatcgtcgcggcacgctgctggttcatgccgatctcacctttgaaaatctgtctcacacccggagcgcgttatgaaaaagatcctgacaaccccgatcaaagctgaagatctgcaagatattcgcgtcggcgatgtgatctacctgaccggtacgctggtgacctgccgcgacgtttgtcaccgccgtttgatcgaactgaaacgtccgatcccttacgatctcaacggcaaagcgattttccacgctggccccatcgtgcgcaaaaacggcgacaaatgggagatggtctccgtcggcccgacaaccagtatgcgtatggaaagttttgaacgtgaatttattgagcagaccggcgtgaaactggtggttggcaaaggtggtatggggccgctgaccgaagaaggctgccagaaattcaaggcgctacatgtgattttcccggcaggctgcgcggtgctggcggcaacccaggtggaagagattgaagaagtgcactggacagagctcggaatgccggagagtctgtgggtctgccgggtcaaagagttcggcccgctgattgtctctattgatacccacggcaacaacctgatagccgaaaacaaaaagctgttcgccgaacgccgcgatcccatcgtggaagagatctgcgagcacgtccattacatcaaataaccctcccggagaggctcacccctctcctttttcgcaggcataacacgatgaaaccttccactgaatggtggcgatatcttgcgccgctggcggtcatcgccattattgctctacttccggttcccgcagggctggagaaccatacctggctctactttgccgtttttactggcgtgatcgttggactgatcctcgaacccgtgccgggtgccgtggtggcgatggtgggtatatccatcatcgccatactctctccctggctgctgttcagcccggagcagctcgctcagccaggctttaaattcactgcaaaatccctcagctgggccgtttccggtttttctaatagcgttatctggctgattttcgccgcctttatgtttggcacaggctatgaaaaaaccgggcttggacgccgcattgcgctgattctggtgaaaaagatgggacatcgcacgctgtttctcggctatgcggtgatgttctccgagctgatcctcgcacctgtaacaccgtccaacagcgcgcgtggtgcggggattatctatcccatcatccgtaacctgccaccgctctatcaaagtcaaccaaacgacagcagtagccgcagcattggcagctacatcatgtggatggggattgttgccgactgcgtgaccagcgccattttcttgacggcgatggcaccaaacttgctgttaattggactgatgaaaagcgcatctcacgccacgctgagttggggcgactggttcctcgggatgttgccgctcagcattttactggttctgctggttccctggctggcttacgtgctgtacccgccggtactgaagtctggcgatcaggtgccgcgctgggcagagacggaactgcaggcaatgggcccgctctgtagccgtgaaaaacggatgctggggctgatggtaggcgcgctggtgctgtggattttcggcggtgattatatcgatgccgcgatggtcggttacagcgtggtggcactgatgctgcttctgcgcattatcagttgggacgacattgtcagtaataaagcggcgtggaacgttttcttctggctggccagccttatcaccctcgccaccggactcaacaacaccggttttattagctggtttggcaaactgttagcaggcagcttaagcggttatagcccaacgatggtgatggtggcgttgattgtggtgttttatctactgcgctactttttcgccagcgccacggcgtatacctccgctctcgcaccgatgatgattgctgctgcgctggcgatgccggaaatcccgctgccggtgttctgcctgatggttggtgcggcaattggtctggggagcattcttacaccatacgccaccggccccagtccgatttactacggcagtggttatctgccaacggcggattactggcgactgggggcgatttttgggctgatattcctcgtattgctggtgattaccggcttactgtggatgcccgtggtgttgctttaagtgaggacggtgccggaaattgctctccggcacccaatagttttacgcagccggtaactccgccagcggccagcgcggacgcacgctaacgccgagatccgccgtcgcgcctgctttaaaccgcaccattccggcataggcgatcatcgcgccgttatcagtacaaaattccggacgcgcgtagaacacttcgccgcggcgttttttcatcatttcagccagcttcgcccgtaacgtacggttagcactcacgccgcccgccatgaccagtcgcttaaagcccgtctgacccagcgcccgcttgcacttaatcatcagcgtatcgaccaccgcatcttcaaaggcgcgggcgatatcagcacgcgtctggtcgtcggtgccgttgtcacgaatggtatttgccgcgaaggttttcaggccggagaagctgaaatccagccccggacggtcggtcatcggacgcgggaagacaaagcgcccggcagtaccctgagccgccattttgctcagtaacggcccgccaggataatccagccccagcagcttcgcggttttatcaaacgcttccccggcggcatcatcgatagactcgccgagcagctcgtactgaccaatgccagtcacgctgattaactgcgtatgaccgccggaaacaagcagcgcaacaaacggaaattccggcgggttatcttccagcatcggcgctaacagatgcccttccatatggtgtacagggatcgccggaacgtcccaggcaaacgccagagaacgccccacggtcgcgccaaccagtagcgcgccgactaatccagggcctgcggtataggccacagcatcaatgtcttttgccgttaaaccagactcctttagcgccgcctggatcaacggtacggttttacgcacatgatcgcgggaggccagttcaggcacgacgccgccgtagtcagcgtgcaatttcacctgactatacaattggttggctaacaaacctttttcatcgtcgtaaatggcgatgccggtttcatcgcaggaagtttcaatacccagtacacgcatgacttgttttacctcgctttattaccgcgcagtgtaggaccaatgcgggttgatgtaaaactttgttcgcccctggagaaagcctcgtgtatactcctcacccttataaaagtccctttcaaaaaaggccgcggtgctttacaaagcagcagcaattgcagtaaaattccgcaccattttgaaataagctggcgttgatgccagcggcaaaccgaattaatcaaaggtgagaggcacatgccggtaattaaagtacgtgaaaacgagccgttcgacgtagctctgcgtcgcttcaagcgttcctgcgaaaaagcaggtgttctggcggaagttcgtcgtcgtgagttctatgaaaaaccgactaccgaacgtaagcgcgctaaagcttctgcagtgaaacgtcacgcgaagaaactggctcgcgaaaacgcacgccgcactcgtctgtactaattccccgagagcgttgctctccgatcagaccgagttgtagttgtaaggccgtgcttccgaaaggaatgcgcggcttattttcgtttatgaattgctaaaaatcggggcctatggctggacgaatcccacgcgtattcattaatgatctgctggcacgcactgacatcgtcgatctgatcgatgcccgtgtgaagctgaaaaagcagggcaagaatttccacgcgtgttgtccattccacaacgagaaaaccccgtccttcaccgttaacggtgagaaacagttttaccactgctttggatgtggcgcgcacggcaacgcgatcgacttcctgatgaactacgacaagctcgagttcgtcgaaacggtcgaagagctggcagcaatgcacaatcttgaagtgccatttgaagcaggcagcggccccagccagatcgagcgccatcagaggcaaacgctttatcagttgatggacggtctgaatacgttttaccaacaatctttacaacaacctgttgccacgtctgcgcgccagtatctggaaaaacgcggattaagccacgaggttatcgctcgctttgcgattggttttgcgccccccggctgggacaacgtcctgaagcggtttggcggcaatccagaaaatcgccagagtttgattgatgcggggatgttggtcactaacgatcagggacgcagttacgatcgtttccgcgagcgggtgatgttccccattcgcgataaacgcggtcgggtgattggttttggcgggcgcgtgctgggcaacgatacccccaaatacctgaacagcccggaaacagacattttccataaaggccgccagctttacggtctttatgaagcgcagcaggataacgctgaacccaatcgtctgcttgtggtcgaaggctatatggacgtggtggcgctggcgcaatacggcattaattacgccgttgcgagcttaggtacgagtaccaccgccgatcacatacaactgttgttccgcgcgaccaacaatgtcatttgctgttatgacggcgaccgtgcaggccgcgatgccgcctggcgagcgctggaaacggcgctgccttacatgacagacggccgtcagctacgctttatgtttttgcctgatggcgaagaccctgacacgctagtacgaaaagaaggtaaagaagcgtttgaagcgcggatggagcaggcgatgccactctccgcatttctgtttaacagtctgatgccgcaagttgatctgagtacccctgacgggcgcgcacgtttgagtacgctggcactaccattgataagccaagtgccgggcgaaacgctgcgaatatatcttcgtcaggaattaggcaacaaattaggcatacttgatgacagccagcttgaacgattaatgccaaaagcggcagagagcggcgtttctcgccctgttccgcagctaaaacgcacgaccatgcgtatacttatagggttgctggtgcaaaatccagaattagcgacgttggtcccgccgcttgagaatctggatgaaaataagctccctggacttggcttattcagagaactggtcaacacttgtctctcccagccaggtctgaccaccgggcaacttttagagcactatcgtggtacaaataatgctgccacccttgaaaaactgagcatgtgggacgatatagcagataagaatattgctgagcaaaccttcaccgacagtctcaaccatatgtttgatagcctgcttgaactgcgccaggaagagttaatcgctcgtgagcgcacgcatggtttaagcaacgaagaacgcctggagctctggacattaaaccaggagctggcgaaaaagtgatttaacggcttaagtgccgaagagcgatcgggaagcccccgacagccgcactgagaggcagcggcaaatatataagtacgccctcgtaattatcgttggcggtaaacaaccgttggatttcagcgttaacggctgaaggacatcgggtcaatcgcccaacaccaacctcatgaaataagtgtggataccgtcttatggagcaaaacccgcagagtcagctgaaacttcttgtcacccgtggtaaggagcaaggctatctgacctatgccgaggtcaatgaccatctgccggaagatatcgtcgatagtgatcagatcgaagacatcatccaaatgatcaacgacatgggcattcaggtgatggaagaagcaccggatgccgatgatctgatgctggctgaaaacaccgcggacgaagatgctgccgaagccgccgcgcaggtgctttccagcgtggaatctgaaatcgggcgcacgactgacccggtacgcatgtacatgcgtgaaatgggcaccgttgaactgttgacccgcgaaggcgaaattgacatcgctaagcgtattgaagacgggatcaaccaggttcaatgctccgttgctgaatatccggaagcgatcacctatctgctggaacagtacgatcgtgttgaagcagaagaagcgcgtctgtccgatctgatcaccggctttgttgacccgaacgcagaagaagatctggcacctaccgccactcacgtcggttctgagctttcccaggaagatctggacgatgacgaagatgaagacgaagaagatggcgatgacgacagcgccgatgatgacaacagcatcgacccggaactggctcgcgaaaaatttgcggaactacgcgctcagtacgttgtaacgcgtgacaccatcaaagcgaaaggtcgcagtcacgctaccgctcaggaagagatcctgaaactgtctgaagtattcaaacagttccgcctggtgccgaagcagtttgactacctggtcaacagcatgcgcgtcatgatggaccgcgttcgtacgcaagaacgtctgatcatgaagctctgcgttgagcagtgcaaaatgccgaagaaaaacttcattaccctgtttaccggcaacgaaaccagcgatacctggttcaacgcggcaattgcgatgaacaagccgtggagcgaaaaactgcacgatgtctctgaagaagtgcatcgcgccctgcaaaaactgcagcagattgaagaagaaaccggcctgaccatcgagcaggttaaagatatcaaccgtcgtatgtccatcggtgaagcgaaagcccgccgtgcgaagaaagagatggttgaagcgaacttacgtctggttatttctatcgctaagaaatacaccaaccgtggcttgcagttccttgacctgattcaggaaggcaacatcggtctgatgaaagcggttgataaattcgaataccgccgtggttacaagttctccacctacgcaacctggtggatccgtcaggcgatcacccgctctatcgcggatcaggcgcgcaccatccgtattccggtgcatatgattgagaccatcaacaagctcaaccgtatttctcgccagatgctgcaagagatgggccgtgaaccgacgccggaagaactggctgaacgtatgctgatgccggaagacaagatccgcaaagtgctgaagatcgccaaagagccaatctccatggaaacgccgatcggtgatgatgaagatagccatctgggggatttcatcgaggataccaccctcgagctgccgctggattctgcgaccaccgaaagcctgcgtgcggcaacgcacgacgtgctggctggcctgaccgcgcgtgaagcaaaagttctgcgtatgcgtttcggtatcgatatgaacaccgactacacgctggaagaagtgggtaaacagttcgacgttacccgcgaacgtatccgtcagatcgaagcgaaggcgctgcgcaaactgcgtcacccgagccgttctgaagtgctgcgtagcttcctggacgattaatcggtaggccggatcaggcgttacgccgcacccggcactaggccctctgcacaaacgccaccttttcggtggcgttttttatcgcccacgcactaccagcgcctggtccagctcgcgatacgcttcaaccagtttctccagactaacgcgacttaaaccgctgggatttggcagcacccaaatctgcgtgctaccaatggtgagcgtttgtttcccccactgtgcaccgcgctggctgaatccctgttcatatgcttgtttgcccagaatcgccaacgcctgcggctgataatcttcaattttttcaatcagcttacgcccgcctgcgtgtagctcctgcttactaacttcattggcttgcaccgttggacggtctaccagtttggtgacgccacaacgataatccagcagatgctgtgcctcctgcggcttcaactgacggtcggtaaacccggcctgatatatcaccttccagaagcgatttgccggatgagcaaagggaaaaccagtcccggcggaactaagcccagggttgataccgcaaaacacgacccgtaaccctggagccaaaatatcctcaaccatatttactcctttctaacatcaccaggaaaagtataacggattgaaaatacattgtttataaaaacagcaggcgcgcggtaatggctggattgcgacacggagttactttataatccgctaccatggccccttagctcagtggttagagcaggcgactcataatcgcttggtcgctggttcaagtccagcaggggccaccagatatagcaaaggctgacgagaaatcgtcagcctttttctttttatatatcagttactttgcgtgccagtaagccgctgcacgtacccgctgtgggtcatactgttccgcttcaaagcggcggcttaaattcttaacgactttaccttcgccggttatccagatgaagtaatcatcggcagggatttgcatctgcgccagacgcgcatctaccgcctgctcatcatgtgccagccattcgatattaaaaccatcaaggtgcgcgagataatcctgacaggcgttatcccgcacgctaaccagcgcactaacttgcggtttaacggcaagtttgctcaacgtttccaggcggcggcgcaatgcaggcattccggattcatcgcagacatacagctgatacgcgtaatcttccggcaccaccaggctaccgcgcggacctgccaccgtaagtttatcgcccggttgcgcctgcatcgcccagccgctggcgaccccaccgtcgtgaataaagaaatcaatcgccagttcatggcgtagttcgtcatacagcggcgtatagtcacggctcggtgggcgtggtccttccggccagacgatgccctcttccgttaccgttggcggcacaaagtgagcgtcaggttgaggaaagaagagtttgctgtgatcgtcaaagccacggcttgtaaaaccgtccagcgcctcgccgccgaggacaatgcgctgaaaaccggcgctgatgcgctcaacgcgtaacacagtcagttcacggaagcgcagatcattgcgaacgcgctgcgggtagcggggggtgttattcattgttatcgccttcgtgatggtaatcagatatatctaaataaaactcgcaaatgataatgattgttaatcatgataaatgcaagcgatttgtagaactgatatgtctatagtctgataagacgaaccgcctcttctcaggcatcattactcaacgccggatgcggcgtgaacgccttatccggcctacgtgtgagatgagtccacgtttaaaaatcatttttacacttgcaagaacgctcatatcagatataaattagatatatctaattaagcaaaaggaggctgatatgagccatcatcacgaagggtgttgtaaacatgaaggccagccacgccatgagggctgctgcaaaggtgagaagagtgaacacgagcactgcggacacggtcaccagcatgaacacggtcaatgctgcggtggtcgccacggtcgcggcggcggtcgtcggcaacgtttctttggtcacggtgaattacgtctggtgattctggatattctcagccgcgatgacagccacggttacgaattgattaaagcgattgagaatctaacccaggggaattacaccccaagcccgggcgtcatctacccaacgctggattttctgcaggagcagagcctgattaccatccgcgaagaggaaggaggtaagaagcagattgcgctgaccgaacaaggcgcgcagtggctggaagaaaaccgcgaacaggtggagatgattgaagaacgcatcaaagcgcgttgcgttggcgcggcgctgcgccagaacccgcaaatgaagcgggcgctggataattttaaagcggtgctggatttacgcgtcaaccagagcgatatcagtgatgcacaaataaaaaagatcattgcggtgatcgaccgcgccgcttttgatattacgcaactggattaatcgccgcatccgccagtggcgcggtgcaattgccggatgcgacgcttgacgcgccttatccggcctacacccgctacacaccccgcaggcctgataagatgcgccagcatcgcatcaggcattgtgctccaaccgccggatccggcataccgattaatgcagtaccgtcaccgcgtcttccagtcggctggcgcggtgtttcaccatcgcgctcacctgcgcactctcttccaccagctcggcatttttctgggtgatcaggttaagctcatccactgcacgggtcaggctggaaagcccatcggcctgttccagcgtactatggctaatctgggcgatcaactgggtgacgtttttcacctgtgccacaatatcttccatcgtccgtccggcggcgtgtacctgctggctaccggattgcaccttatcagcactggcatcaatcagcttgcgaatatcgttggcagcattagcgctgcggctggctaaatgacgcacttcccctgccaccactgcaaaacctttgccctgttcgccggcacgcgccgcttccaccgccgcattcagggccagaatattggtctgaaacgcaatatcgttaatcaggctagtaatggtgccaatgcgctgggtactgtcggcgatatcgtccattgtcttgatcaccgtggtcatcgcctccccaccctgcactgccgcattactggcagtgatactcagtttatcggcagcgctcgccgtggcagagttctgtttcacgctcgccgccatttggttcatggtcgccaccgtttgctgaacgttatcaactgtctgctgggtatgttcgttcagttcatcggtgcctttcgccagcgtctcactgccatttctgacactggacacctggctactgacatcgttaattagccaacggcacatcaggccaagttgccctaccgcacgtaatgtcagccccagctcatcgctgcgattcagatgctcaacactattacgttctccggtcgccaccttcagtgcctgatgggcaacattttctatcgggcgcacaatctgccattcaaaacaggcgcttgccaacaataccactaacgcacagaggatatacgtcaccaccggggcagcaacaaaccaaagcatggccgccagcaagataaacatcagggtcatcactccacgcgcccgccagcgaagcggtaaactaggcagtttacccagccagcctttacgcaccaccaggcctttatgaatacgcttactggtacgtccggcgttcaacgctttgtacagcggctccaccgccgcgatctcttcatccgtcgcccgggtacgaatgctcatatagccactgatttttccctcgcgcaccatcggtaccgcattggcccgcacccaataatggtcaccatttttgcggcgatttttcacgatgccgctccagggctccccttttttcagggtgaaccacatatccgcaaacgccgcttttggcatatccgggtgacgcaccatgttgtgcggctgcccttgtaactcttgcaaggtatagccgctcacctgcacaaaagtgtcattagcatgagtgatatagctttgcagatcggtagtggacatcagagtggtatcgtccgccagcggggtattttgctgggtgacatacggatgagaagacatgttcgcgtcctgtgcaggttatatggttgttaacttcttgtcagagtttatgtcggccccgctgcggttatctttaaccgattaatttgatttagatcgcaatttgcgatttaaacacaaatctaattccttgatttaaaatactttcactctgttactatacgaaaacgttaattatcttgcccaaaaatcaggcaattattgccctgaaaacgtgcatttgcgcagcaatcatcaaatccatacccgacaaaaaccgtgcaaaataacaacaaatgttaacagatagcattaaatattgcacaaatgataaccgaatttgtgtttatcccgattttcgcgatcgcagccggagtggcgcaatccctgcaatacttaaatcggtatcatgtgatacgcgagcctccggagcatattttgaacaggttacctagcagcgcaagcgctttagcgtgcagcgcccacgccctgaatctcattgagaagcgaacgctggatcatgaggagatgaaagcacttaaccgagaggtgattgaatacttcaaagagcatgtcaatccggggtttttagagtatcgcaaatctgttaccgccggcggggattacggagccgtagagtggcaagcgggaagtttaaatacgcttgtcgacacccagggccaggagtttatcgactgcctgggaggttttggaattttcaacgtggggcaccgtaatccagttgtggtttccgccgtacagaatcaacttgcgaaacaaccgctgcacagccaggagctgctcgatccgttacgggcgatgttggcgaaaacccttgctgcgctaacgcccggtaaactgaaatacagcttcttctgtaatagcggcaccgagtccgttgaagcagcgctgaagctggcgaaagcttaccagagtccgcgcggcaagtttacttttattgccaccagcggcgcgttccacggtaaaagtcttggcgcgctgagcgccacggcgaaaagcaccttccgcaaaccgtttatgccgttactgccgggcttccgtcatgtgccgtttggcaatatcgaagccatgcgcacggctcttaacgagtgcaaaaaaaccggtgatgatgtggctgcggtgatcctcgaaccgattcagggtgaaggtggcgtaattctgccgccgccgggctatctcaccgccgtacgtaagctatgcgatgagttcggcgcactgatgatcctcgatgaagtacaaacgggcatggggcgcacgggcaagatgttcgcctgcgagcatgagaacgtacagccggatatcctctgccttgccaaagcgctcggcggcggcgtgatgccgattggcgcgaccatcgccactgaagaggtgtttagtgttctgttcgacaacccattcctgcataccaccacctttggcggcaacccgctggcctgtgcggcggcgctggcgaccatcaatgtgttgctggagcagaacttaccggctcaggctgagcaaaaaggcgatatgttgctggacggtttccgtcaactggcgcgggaatatcccgatctggtacaggaagcgcgtggtaaagggatgttgatggcgattgagtttgttgataacgaaatcggctataactttgccagcgagatgttccgccagcgcgtactggtggccggaacgctcaataacgccaaaacgatccgcattgaaccgccactgacactgaccattgaacagtgtgaactggtgatcaaagcggcgcgtaaggcgctggcggccatgcgagtaagtgtcgaagaagcgtaatatcaaatcggatggcgatacgacgtcgccatccgatctttttatacgacgcgtacgcccgcaggcatcatccgctccggcgttaacagcacgctttcactgccgtcatcggtttccgcacacaacagcatgcattcgctcgtttcaccacgcattttcgctttttgcagattgcataagaccaccaccgttttccccatcagctcttcttcgctgtagtacggcaccaggctggtcacggtttgcagcgttttttgccccacatcaacctgtacgatgtacagcttgtcggcgttttcatggcgtttcacttccacaatctttccgacgcgcatttccagacgtgcaaaatcagcgtaagccacggtttccattgcttcctcccttagggtaaaattttactaaactatagcaaaagtttttctcaatcctgtaggctaaaaatggagaatgcaggcgtgatcacattcgtgagccgctgtgttaccgttacagcgtcaaagaaacgcgctttatttactgaaaacaggtgacccgataagcacttcctctacaatgggggcgcacatcagggaaagtaaaaaaggtaaacatggcaacactaaaagacatcgcaatcgaagctggcgtatccctggcgacagtatccagggtcttaaatgacgatccgacattgaatgtgaaagaagagacgaaacatcgcattctcgagatcgccgaaaagctggagtacaagaccagtagtgcccgtaaactccagacaggtgcagtcaaccaacaccatattctggctatctacagctaccagcaggagctggagatcaacgatccttactatctggcgatccgccacggcattgaaacccagtgcgaaaagctgggcatcgagctcaccaactgttatgaacacagcggcttaccagacattaaaaacgtcaccggtattttaattgtcggcaaacccacgcccgccctgcgcgccgctgccagcgcgttgaccgacaatatctgttttatcgactttcacgaacccggcagcggttacgatgcggtggatatcgatctggcacgcatcagtaaagaaatcatcgacttctatatcaaccagggcgttaatcgtattggttttattggcggtgaagatgagcctggcaaggcggatattcgtgaggtcgcctttgcggaatatggccgactgaaacaagtggtacgcgaagaggatatctggcgcggcggtttttccagtagcagcggttatgaactggcaaaacaaatgctggcgcgggaagactatccgaaggcactgtttgttgcttccgattccattgctatcggcgtactgcgggcaattcatgaacgaggcctgaacatcccacaggatattagccttatcagcgttaacgatatccccaccgcgcgatttacctttccgccgctctccaccgtgcgcatccattccgagatgatgggaagtcagggcgttaacctggtgtatgaaaaagcccgcgatggtcgcgcgctgccgctgttagtcttcgttcccagcaaattaaaactgcgcggcacgacccgttaaatccccttacacactgtccggcaatcgtttttgccggacagtgctgccgtttattttcgtgatccagttaaagtaaatgcatttacctgctactttttagtaaaaattttactaaactccccagcaattacacaaactaccatcaccatgaatggttccgatttctctctaccgggaggccctatgaatcgctgggaaaacattcagctcacccacgaaaaccgacttgcgccgcgtgcgtacttttttagttatgattctgttgcgcaagcgcgtacctttgcccgcgaaaccagcagcctgtttctgcccttaagcggtcagtggaatttccacttttttgaccatccgctgcaagtaccagaagccttcacctctgagttaatggctgactgggggcatattaccgtccccgccatgtggcaaatggaaggtcacggcaaactgcaatataccgacgaaggttttccgttccccatcgatgtgccgtttgtccccagcgataacccaaccggtgcctatcaacgtattttcaccctcagcgacggctggcagggtaaacagacgctgattaaatttgacggcgtcgaaacctattttgaagtctatgttaacggtcagtatgtgggtttcagcaagggcagtcgcctgaccgcagagtttgacatcagcgcgatggttaaaaccggcgacaacctgttgtgtgtgcgcgtgatgcagtgggcggactctacctacgtggaagaccaggatatgtggtggagtgcggggatcttccgcgatgtttatctggtcggaaaacacctaacgcatattaacgatttcactgtgcgtaccgactttgacgaagcctattgcgatgccacgctttcctgcgaagtggtgctggaaaatctcgccgcctcccctgtcgtcacgacgctggaatataccctgtttgatggcgaacgcgtggtgcacagcagcgccattgatcatttggcaattgaaaaactgaccagcgccagctttgcttttactgtcgaacagccgcagcaatggagtgcagaatccccttatctttaccatctggtcatgacgctgaaagacgccaacggcaacgttctggaagtggtgccacaacgcgttggcttccgtgatatcaaagtgcgcgacggtctgttctggatcaataaccgttatgtgatgctgcacggcgtcaaccgtcacgacaacgatcatcgcaaaggccgcgccgttggaatggatcgcgtcgagaaagatctccagttgatgaagcagcacaatatcaactccgtgcgtaccgctcactacccgaacgatccgcgtttttacgaactgtgtgatatctacggcctgtttgtgatggcggaaaccgacgtcgaaagccacggctttgctaatgtcggcgatattagccgtattaccgacgatccgcagtgggaaaaagtctacgtcgagcgcattgttcgccatatccacgcgcagaaaaaccatccgagcatcatcatctggagcctgggcaatgaatccggctatggctgtaacatccgcgcgatgtaccatgcggcgaaagcgctggatgacacgcgactggtgcattacgaagaagatcgcgatgctgaagtggtcgatattatttccaccatgtacacccgcgtgccgctgatgaatgagtttggtgaatacccgcatccgaagccgcgcatcatctgtgaatatgctcatgcgatggggaacggaccgggcgggctgacggagtaccagaacgtcttctataagcacgattgcattcagggtcattatgtctgggagtggtgcgaccacgggatccaggcacaggacgaccacggcaatgtctggtataaattcggcggcgactacggcgactatcccaacaactataacttctgtcttgatggtttgatctattccgatcagacgccgggaccgggcctgaaagagtacaaacaggttatcgcgccggtaaaaatccacgcgcgggatctgactcgcggcgagttgaaagtcgaaaataaactgtggtttaccacgcttgatgactacaccctgcacgcagaggtgcgcgccgaaggtgaaacgctcgcgacgcagcagattaaactgcgcgacgttgcgccgaacagcgaagcccccttgcagatcacgctgccgcagctggacgcccgcgaagcgttcctcaacattacggtgaccaaagattcccgcacccgctacagcgaagccggacaccctatcgccacttatcagttcccgctgaaggaaaacaccgcgcagccagtgcctttcgcaccaaataatgcgcgtccgctgacgctggaagacgatcgtttgagctgcaccgttcgcggctacaacttcgcgatcaccttcagtaaaatgagtggcaaaccgacatcctggcaggtgaatggcgaaagcctgctgactcgcgagccaaagatcaacttcttcaagccgatgatcgacaaccacaagcaggagtacgaagggctgtggcaaccgaatcatttgcagatcatgcaggaacatctgcgcgactttgccgtagaacagagcgatggtgaagtgctgatcatcagccgcacagttattgccccgccggtgtttgacttcgggatgcgctgcacctacatctggcgcatcgctgccgatggccaggttaacgtggcgctttccggcgagcgttacggcgactatccgcacatcattccgtgcatcggtttcaccatgggaattaacggcgaatacgatcaggtggcgtattacggtcgtggaccgggcgaaaactacgccgacagccagcaggctaacatcatcgatatctggcgcagcaccgtcgatgccatgttcgagaactatcccttcccgcagaacaacggtaaccgtcagcatgtccgctggacggcactgactaaccgccacggtaacggtctgctggtggttccgcagcgcccaattaacttcagcgcctggcactatacccaggaaaacatccacgctgcccagcactgtaacgagctgcagcgcagtgatgacatcaccctgaacctcgatcaccagctgcttggcctcggctccaactcctggggcagcgaggtgctggactcctggcgcgtctggttccgtgacttcagctacggctttacgttgctgccggtttctggcggagaagctaccgcgcaaagcctggcgagctatgagttcggcgcagggttcttttccacgaatttgcacagcgagaataagcaatgaggatcatcgataacttagaacagttccgccagatttacgcctctggcaagaagtggcaacgctgcgttgaagcgattgaaaatatcgacaacattcagcctggcgtcgcccactccatcggtgacagtttgacttaccgcgtggagacagactccgcgaccgatgcgctatttaccgggcatcgacgctattttgaagtgcattactacctgcaagggcagcaaaaaattgaatatgcgccgaaagagacattacaggtagtggaatattatcgtgatgaaactgaccgtgaatatttaaaaggctgcggagaaaccgttgaggtccacgaagggcaaatcgttatttgcgatatccatgaagcgtatcggtttatctgcaataacgcggtcaaaaaagtggttctcaaagtcaccatcgaagatggttatttccataacaaataacaactacggcggcaaaaggagtttgccgccaccgctaccctactcattttcggagatgtgttatgtctgataccaaacgtaatacaatcggcaaattcggcttgctcagcctgacttttgccgccgtttacagctttaacaacgttatcaataataatattgagcttggactggccagcgcaccgatgtttttcctcgcgacgattttttattttattcccttctgtctgatcatcgcagaatttgttagcttaaataaaaacagtgaagccggtgtctacgcgtgggtaaaaagtagcctgggcggacgttgggcatttattactgcctatacctactggttcgtaaacctgttctttttcaccagtctgttgccgcgcgttattgcttatgctagctatgccttcctcggatacgaatatattatgacgccggttgccaccaccattatcagtatggtgctgttcgccttctccacctgggtttccaccaacggggcgaaaatgttggggccaattacctccgtcactagtacgctgatgctgctgttaacgctctcctacattttactggcaggtacggcgctggttggcggcgtacagcctgctgacgccatcaccgttgacgcgatgatcccgaacttcaactgggcgttcctcggcgttaccacctggatctttatggccgcaggtggcgcggagtccgtcgctgtgtacgttaacgacgtcaaaggcggtagcaaaagcttcgttaaagtgatcatcctcgccgggatttttatcggcgtactgtattccgtctccagcgtgctgattaacgtcttcgtcagcagcaaagagttgaaatttaccggcggaagcgtgcaggtattccacggcatggcggcgtattttggtctaccggaagcgttgatgaatcgctttgtcggtctggtgtcctttaccgcgatgttcggttccctgctgatgtggaccgcaacgccggtgaaaattttcttctccgaaatcccggaaggcatctttggtaagaaaaccgtcgaactgaacgaaaacggcgttccggcgcgcgcagcgtggatccagttcctgatcgtcatcccgctgatgattatcccgatgctcggttccaataccgtgcaggatctgatgaatactattattaatatgaccgccgcagcgtccatgcttccgccgttattcatcatgctggcttacctgaatttacgcgccaaattagatcacctgccacgcgatttccgtatgggctcccgccgcaccggtattatcgttgttagtatgctgattgcgatatttgccgtagggtttgtcgctagcacattcccgactggcgcgaatattctgaccatcattttttataacgtcggcggtattgttatcttccttggctttgcgtggtggaaatacagtaaatatataaagggattaacggctgaagagcgccatattgaagcgacgccagccagcaatgttgattaagcagaataataaaaaatgagcaggcattttccctcttcctggatgaggagagggaaaatagtttctgcctttatatttttataattacaacgataaaaggctgtactttttctttagctcatggattaacacaatgaaattaatcactgcaccatgcagagcattacttgctctgccgttttgctacgccttttctgcggcaggagaagaagcacgtccggcagaacatgacgacacaaaaacacccgcaattaccagcacatcttctcctagttttcgtttttacggcgaattaggggttggtggatatatggatttagagggtgagaataaacataaatacagcgacggtacctatattgaaggtggcctggagatgaagtacggctcctggttcggcctgatttacggcgaaggctggaccgtgcaggccgaccacgacggcaatgcctgggtgccagaccatagctggggtggtttcgagggcggaattaaccgtttctatggcggttatcgtaccaatgatggcaccgaaatcatgctcagtctgcgtcaggattccagcctggatgacctgcaatggtggggcgatttcacccccgatctgggctacgtcattcccaatacccgcgacattatgactgcgctgaaggtacagaacttaagcggcaactttcgttatagcgtcaccgcgactcctgccggacatcatgatgaaagcaaagcctggctacattttggcaaatacgatcgctatgacgacaaatacacctatccggcaatgatgaacggttacatccagtatgaccttgccgaaggcatcacctggatgaacggtctggaaatcaccgacggcacaggacagctctatctcacgggcctgctaactcctaactttgccgctcgcgcctggcaccataccggacgcgccgacgggctggacgtaccgggaagtgaaagtgggatgatggtgagcgccatgtatgaagcgttaaagggcgtttatctctccaccgcttacacctacgccaaacatcgccctgaccacgctgacgatgaaaccacctctttcatgcagtttggtatctggtacgaatacggcggcggacgtttcgccacggcttttgatagccgcttctacatgaaaaatgcctctcacgatcccagcgaccaaatcttcctgatgcaatatttctactggtaataaggactgtaatttcatgaaaataaaaactattttaacgccagtaacctgcgctctgctgataagtttttccgcccatgccgctaacgccgacaattataaaaacgtgattaaccgtactggcgcgccgcagtacatgaaggattacgattacgacgatcaccagcgttttaatccgtttttcgatctcggagcctggcatggtcatctgttgccagacggccctaacaccatgggcggctttccgggcgttgcgctgctgacggaagagtacatcaactttatggccagcaatttcgaccgcctgaccgtctggcaggacggcaagaaagtcgactttacgctggaggcatacagtattcccggtgcgctggtgcaaaaactgacagcaaaagatgtgcaagtcgaaatgactctgcgcttcgccacgccgcgcacgagtctactggaaaccaaaatcaccagcaataaaccgctggatctggtgtgggacggcgaactgctggaaaaactggaagcgaaagaagggaaaccgctttccgataaaaccattgctggcgaataccctgactatcagcgcaaaatcagcgccacccgtgatggcctgaaagtcacctttggcaaagtgcgcgccacctgggatctgctgacctccggcgaaagcgaatatcaggtgcataaatccctgccggtgcagactgaaatcaacggtaatcgctttaccagtaaggcgcatatcaacggtagcaccacgctctacaccacctattcccatctgctgaccgctcaggaagttagcaaagagcaaatgcagatccgcgatattctggcgcgtccggcgttttatctcaccgccagccagcaacgctgggaagaatacctgaagaaagggttaaccaatccggatgcgacgccggaacagacgcgcgtcgcggtgaaagcgatcgaaacgctcaacggtaactggcgcagtccgggcggtgcggtgaaatttaacaccgttacaccgagcgtgaccgggcgctggttctccggcaatcagacctggccgtgggatacctggaagcaggcgtttgcgatggcgcatttcaatccggacatcgccaaagagaatatccgcgcggtcttctcctggcagatccagcctggcgatagcgtgcgtccgcaggatgtgggctttgtccccgacctgatagcgtggaaccttagccccgagcgtggtggcgatggcggcaactggaacgaacgtaataccaaacccagccttgccgcctggagcgtgatggaagtgtataacgtcacccaagataaaacctgggtggcagagatgtacccgaaactggtggcctatcacgactggtggttacgtaaccgcgatcacaacggcaacggcgtgccggaatatggcgcgacccgcgacaaagcccacaacactgagagcggcgagatgctgtttacggtgaaaaaaggcgataaagaagagacgcagtctgggctgaacaactacgcccgcgtggtggagaaaggccagtacgacagtctggaaattccggcacaggttgctgcaagctgggaaagcgggcgtgatgatgccgccgtctttgggtttatcgacaaagaacagttggataaatatgtcgctaatggcggcaaacgtagcgactggacggtgaaattcgccgaaaaccgcagtcaggacggaacgttgctgggctacagcctattgcaggagagcgtggatcaggccagctatatgtacagcgataaccattatctggcggagatggcaaccatcctcggtaagccagaagaggccaaacgctatcgccagttggcacagcagctcgcggactacatcaacacctgtatgttcgacccgactacccagttctactatgacgtacgtattgaagataaaccactggcgaacggctgcgcgggcaaaccgattgttgagcgcggtaaagggccggaaggctggagcccgctgtttaacggtgcggcaacgcaggccaatgccgacgcggtggtgaaggtgatgctcgatcctaaagagttcaacacctttgtcccgctgggaacggcggcgttaaccaatccggcttttggcgctgatatctactggcgtgggcgcgtatgggtggatcagttctggtttggtctgaaagggatggagcgttacggttatcgtgatgatgccctgaagctggcggatacgttcttccggcacgccaaagggttaaccgccgatggaccaattcaggaaaattacaacccgctgacaggcgcacagcaaggcgcaccaaatttctcctggagtgccgcgcatttgtatatgttgtataacgattttttccgtaagcaataatttgcaactgctggcggatgcggcgtaaacgccttatccgccctacatgtgcaatcctcctggccggataaaacgcggcaagcgttgcatccggcaactgcaccgcgccactggcggatgcggcgtgaacgccttatccgccctacatgtgtgttcccgtaggtcggataagacgcgacaagcgtcgcatccggcatctgcaccgcgccactggcggatgcggcgtggacgccttatccgccctacatgtgcaattccgtaacctggataaaacgcgacaagcgtcgcatccggcgttatcaccgggcgtattctttttgaatcccatcacaaaccccgcactccccttttcccttttctccggcgacggctaaattagaactcatccgaccacataacaattattttacatactggacaattttatgagctacccgagcctgttcgccccgctggatttaggttttaccacgttaaaaaaccgcgtgttgatgggcagtatgcacaccgggctggaggaatacccggacggtgccgagcggctggcagcgttttatgccgaacgcgcccgtcacggcgtggcgctgattgtcagcggcggcattgcaccagatttaacaggcgttggcatggaaggtggcgcaatgctcaacgacgccagccagatcccacaccatcgcaccattaccgaagcggtacatcaggaaggcggcaaaatagccctgcaaattttgcataccgggcgctacagctaccaaccgcatctggtcgccccgtccgcattgcaggcccccatcaaccgtttcgtgccccatgagttaagccatgaagagatcctgcaactgatcgacaatttcgcccgctgcgcgcaactggcgcgggaggcaggatacgacggtgtagaggtgatgggttccgaagggtatttgatcaacgaatttctgacgctgcgcaccaatcagcgtagtgaccagtggggcggcgattaccgcaaccggatgcgatttgccgtagaagtagtgcgtgcggtgcgcgaacgcgtcggcaacgacttcattattatctaccgactgagcatgctcgacctggtcgaagacggcgggacttttgccgaaacggtagagctggcgcaggccattgaagcggcgggcgcgaccattatcaacaccggcattggctggcatgaagcacgtattccgaccattgccacgcccgtgccgcgcggcgcatttagctgggtcacgcgcaaactgaaaggccacgtcagcctgccgctggtaaccaccaaccggattaacgatccgcaggttgccgacgatattctcagccgcggcgatgccgatatggtaagcatggcgcgaccgtttcttgctgatgcggagctgctgagtaaagcgcaaagcggacgagccgatgagatcaacacttgtattggctgcaatcaggcctgtctcgatcaaatcttcgttggcaaagtcaccagctgcctggtgaatcctcgcgcctgccacgaaaccaaaatgccaatccttcccgccgtgcagaaaaaaaatctggcggtggtcggtgcgggacctgctgggctggcgtttgccattaacgcggcggcgcgtgggcatcaggtaacattgtttgacgctcatagcgagattggcgggcagtttaatatcgccaaacagatccccggcaaagaggagttttacgaaacgctgcgctattaccgccggatgatcgaagtgacgggcgtgacgctaaaactcaatcacaccgtgacggcggatcagttacaggctttcgatgaaacgatcctcgccagtgggatcgtgccgcgcactccgcccatcgacgggatcgatcatccgaaggtattgagttatctcgatgtactgcgcgacaaagcgccggttggcaacaaagttgccatcatcggttgtggcgggattggttttgatacggcgatgtatttaagtcagccgggcgaatccaccagccagaatatcgccgggttctgtaatgaatgggggatcgacagtagcctacaacaggctggtggcttaagcccgcagggaatgcagatcccccgtagcccacggcagattgtgatgctccagcgcaaagccagcaaaccaggacaggggttaggcaaaaccaccggctggatccatcgcaccaccctgctcagccggggtgtgaaaatgatcccaggcgtaagttatcagaagattgacgatgacgggctgcatgtggtgatcaacggcgaaacgcaggtattagcagtggacaatgtggtgatctgcgcagggcaagagccaaaccgcgcgctggcgcaaccgctgattgatagcgggaaaacggtgcatttaattggcggctgcgatgtggctatggagctggacgcacgacgggcaattgcccagggaacacggctggcgctggagatttaaatcgttatttgaagcgccggatgcaacgcatccggcacgtcgcgttaatcaataaacaaggcgggagaaatgccgaatcgcgttgccaattttttagcgtgttccagcgttaatttcctcttcccgctcaaaacgcgactcaccatagatttactgccaatttccggcagatcggaaagggttaaaccatattgatccataagggtacgaatcacggctataccgccaggcatggcttgagccatggcattaaattccgcaaattcgggcgcactttcttcccacgcggttattttggcacacaccagatccagcaaggggttttcaggatcgttgagcagcagatgatctaccagttccagcgcctgggtgtattgttcctcgttctgaatacccgccagaaaaggtgccacagcagttagcttttctcctgcttgcaagatgtcggcaatcgcaatcattttttccccttagtacgatgaacagcggtaaagaaatcgtattctttatgcgtcataacttcacgtatgtagcacttttggctttcaaaaaagaccattgctacaacacgtaattcattgcccccaacattgaaaacataatgcttatccagatatttgaagttatccagagatgggaatactgcttttaaactctcaggttttttgaaatatcccttagcaatcgtgttccccagagccaccaactccgttttatgttgcgggtatttttccgcagcatctttcaatgctttttgagttatcaggtgcattcttcatcacgtccgttgacaaattggcaatatgataacatccgttgccagattggcaacggatgaatttatctgtgtgacggaagaataaacgtagaaaaacgctaaacaagagaatgtagacgatggtgacagggattttttgttttatggaagcgcgattccagaactgggcagacattgccggatgcgacgcttgccgcgtcttatccggcctggagtaacgtgctgaacgtaggccggataaggcgtttacgccgcatccggcaggtaactcccaatcttaccgacgacgtcccagcttcaccgctttcagtaccacaaatttattattcgtcgcaatagtggtgcagttgccgaaaatcttcttcagtttatggaagtaatccaggtgacggttggcaacgatatacagctcgccgttgattttcaggcagcggcgggcgtggtggaacatctcccaggcgacgttatcggtcagcgcatgttgttggtgaaacggcgggttgcagagcacagcattaaagcggaaaggctccacgccggagagcgcgttgttgatcataaactcgcagcgatccaacgcctctggcatgttggtttcaacgttcaaacggctggaagcaaccgccatcgggctttcatcgacaaacaccactttcgcctgcgggtttttatcaagcagcgtcagaccaataacgccattaccgcaaccgagatcgacaatctccccttcgagattctctggcagatgttgcataaagaagcgcgcgccgatatcaagcccggtgcgggagaagacattcgcatggttgtggatagtccagtcagtaccttccagcttccagctaacggtctgcggcgcatcggccagctgcggttcattgaaagtgcaattaatcaggcgcgcttttttccatgccagcgtggtggtggttgggccgagcactttttcgaacagttccagcgtggaagtgtgaatgtcacgggccttggcaccggcaataatacgtgtatcgctcgtgaccactttgcgcagcgcacgcagttgctgttccagcaatgccagtgttttcggcactttgatcagcaccacacccggctgttgcgggtagtcggcggtgctgtcgagaaacttcacgctgctctcatcaatcccgttgaggcgtaaattctcgcgcgtcgccagttcactgatgtaactgtcgccaatgctgtacggcttatgttccgccagtgcgcagcttaacgcaccaaaggcatcattcaggatcaacaccgggccgcggatttctgtgtcgtccaactgttgcagcaaatattcatccgccgcttcccacgcctgtagcgggttaacgtcatccgtcgccggaaaacgttgtagtgtcagactacggaaaccgttgtctaagtggctcatcggccctcctgaatgataaaatttcgacattgcccctgaaaagggtgcgtgagtataccctttttctctttttcgtgggcggttatgagcaatcttacttatcttcagggttatcccgagcagctactttcccaggtgcgaacactgattaacgaacagcgtctgggcgatgtgctggcaaaacgctatccgggaacacacgactacgccaccgataaagccctctggcaatatactcaggatctgaaaaatcagtttctgcgtaatgccccgccgatcaataaagtgatgtatgacaataagatccatgtgctaaaaaacgcgctcgggttacataccgctgtttctcgtgtgcagggcggcaagctgaaagcaaaggtggagatccgcgtcgctaccgtgtttcgcaacgcgccggaaccgtttttgcgcatgatcgtggtgcacgagctggcgcacctgaaggagaaagagcataacaaagcgttttaccagttgtgttgtcatatggaaccccagtaccaccagcttgagttcgacacccgactgtggctaacgcagttgagccttgggcagaacaaaatctgaaaatgatgtcaggcgttatcttttctttctttagcgcctaaaatcgacctcccccctttcgttaaggataacgaccatgctgcgcgcatttgcccgccttcttctccgtatttgtttttctcgccggactctaaagattgcctgcttactgttacttgtggcaggagcgaccatccttatcgccgatcgcgtaatggtcaacgccagcaaacagctgacctggagcgatgtcaacgccgttccggcgcgtaacgtgggtttattgctgggggcgaggccgggtaatcgctactttacccgacgtattgataccgcagcagcgttgtaccacgccggaaaagtgaaatggctgctggtaagtggcgataacggacgtaaaaattacgatgaagcaagtggtatgcagcaggctttgatcgctaaaggcgtaccagcaaaagtgatcttctgcgactatgccggattcagtacgctggatagcgtagtgcgtgccaaaaaggtttttggtgaaaaccatatcaccattatcagccaagaatttcataatcaacgcgccatctggctggcaaaacagtacggcatcgacgctatcggttttaacgcgccagacctcaatatgaagcacggtttttatactcaactgcgggagaaactcgctcgtgtcagcgccgtgattgacgccaaaatcctccatcgccagccgaaatatctcgggcctagcgtcatgattgggccgtttagtgagcatggctgtccggcgcagaaataatgcgtatctgcgcacgtcgaagatgaaaaaggcgtgctacattgacgacagaatccctttatggagtatccacgcgttatgatacgtttcgctgtgattggtacgaactggatcactcgccagttcgtcgaggccgcccatgagagcggtaaatacaagttaaccgccgtatattcccgcagccttgaacaggcccagcacttcgccaatgatttttctgtcgagcatctgtttaccagcctggaagcgatggcggaaagcgatgccattgacgcggtgtatattgccagcccgaattccctgcatttttcccagacacaacttttccttagccataaaattaatgtgatttgcgagaaaccgctggcgagcaatctggcggaagtggatgccgccattgcctgtgcgcgggaaaatcaggtggtgctgtttgaggcatttaaaaccgcctgcctgccgaactttcatttgttgcgccaggcgctgccgaaagtcggcaaactgcggaaagtctttttcaactattgccagtattccagccggtatcaacgttacctggatggtgagaatcccaacacctttaatccggcattctctaacggtagtattatggatatcggtttttactgtctggcgagcgcggtggcgttatttggtgagccgaaaagcgtgcaggcaaccgccagtttgctggcaagcggcgttgacgcccagggcgtggtggtgatggattacggtgatttcagcgtcaccttgcagcacagtaaagtcagtgattctgtcctggcgagcgagattcagggcgaagcaggaagcctggtgattgaaaaactgtctgaatgccagaaagtgtgcttcgtgccgcgtggcagccaaatgcaggatctcacccagccgcagcatattaataccatgctctacgaagcagagctgttcgctaccctggtggatgagcatctggtggatcatccagggctggcggtcagtcgcatcaccgccaaactgctgaccgagatccgccgccagactggggtgatttttccggcagatagcgtaaaactataattgccaaagtaaaacagtgtaaaaggtatgtaacagaccattgactggctgaatggtctgtcatactttgttacctgcaaaggggagtaacttcattgccggtcgatcgtcattacgatgtgtgaaaaaacacatccggtcaccgggcaacccgaaaggaatacgcagacgtattccttttttgttgtaagtgagaccttgccggaaggcgaggtctatgcataaaaagcagcggctgacgtcttccgacgttggccgtttttttatgtgtaaggaacttctatgaatactgtcggcacgccgttgctatggggcggattcgctgttgttgtcgccattatgctggctatcgacctgttgttgcaggggcgtcgtggggcacatgccatgaccatgaaacaggctgcggcctggagcctggtctgggtgacgctgagcttactgtttaacgccgctttctggtggtatctggtgcaaaccgaaggtcgcgccgttgccgatccacaggcactggcctttctcacaggttatctgattgagaaaagcctggcggtcgataacgtctttgtctggctgatgttgttcagctatttctctgttccggcggcattacaacgccgcgtgctggtgtatggcgtgctcggggcgattgttctgcgtaccatcatgatcttcactggcagctggctaattagccagttcgactggatcctgtatatcttcggtgccttcctgctgtttaccggcgtgaagatggcgctcgcccatgaagatgaaagtggcattggcgacaagccgctggtgcgctggctacgcggtcatttgcgcatgaccgacaccatcgacaacgagcatttctttgtgcgtaagaatggattgctgtacgccacaccgctgatgctggtactgattctggtggaattgagcgacgtgattttcgccgtggatagcattccggctatcttcgccgtgaccactgacccgttcattgtgctgaccagtaacctgtttgcgatcctcggcctgcgtgcgatgtatttcctgctggcgggcgtagcagagcgtttcagcatgctcaaatatggcctggcggtgattctggtgtttatcggtatcaagatgctgattgtcgacttctaccatattccaatcgccgtcagcctgggcgtggtgtttggcattctggtgatgacgtttattatcaacgcctgggtgaattatcggcatgataagcagcggggtggataatttttaatctgcctaagccgtgtaccctgtcattaacatgagcaccgttttctccctctcccttccagggagagggtcggggtgagggtaatttttcgcaccgatgctggcctgttcccctcaccctaaccctctccccaaacggggcgaggggactgaccgagtccttttttgatgttgtcatcagtctggaagccgcacgttggctttatttttatgtcaaagaaatgtaaccattaagtttcaaaatatgacctctctttaaaatccagcatttttcgcttcccgaagctgtaactttccttatactcgaccttgcaaacactttgttacatcctgaaagatgcgtcgacagaacgcaccagggatgtgcgacaacacaatgaaaggatcgaaaaatgactacgcaacgtagtccggggctattccggcgtctggctcatggcagcctggtaaaacaaatcctggtcggccttgttctggggattcttctggcatggatcagtaaacccgcggcggaagctgttggtctgttaggtactttgttcgtcggcgcactgaaagccgttgcccccatcctggtgttgatgctggtgatggcatctattgctaaccaccagcacgggcagaaaaccaatatccgccctattttgttcctctatctactgggcaccttctctgctgctctggccgcagtagtcttcagctttgccttcccttctaccctgcatttatccagtagcgcgggtgatattagcccgccgagtggcattgtcgaagtgatgcgcgggctggtaatgagcatggtttccaaccccatcgacgcgctgctgaaaggtaactacatcgggattctggtgtgggcgatcggcctcggcttcgcactgcgtcacggtaacgagaccaccaaaaacctggttaacgatatgagcaatgccgttacctttatggtgaaactggtcattcgcttcgcaccgattggtatttttgggctggtttcttctaccctggcaaccaccggtttctccacactgtggggctacgcgcaactgctggtcgtgctggttggctgtatgttactggtggcgctggtggttaacccattgctggtgtggtggaaaattcgtcgtaacccgttcccgctggtgctgctgtgcctgcgcgaaagcggtgtgtatgccttcttcacccgcagctctgcagcgaacattccggtgaatatggcgctgtgtgaaaagctgaatctggatcgcgatacctattccgtttctattccgctgggagccaccatcaatatggcgggcgcagcaatcactattaccgtgttgacgctggctgcggttaatacgctgggtattccggtcgatctgcccacggcgctgctgttgagcgtggtggcttctctgtgtgcctgtggcgcatccggcgtggcgggggggtctctgctgctgatcccactggcctgtaatatgttcggtattagcaacgatatcgccatgcaggtggttgccgtcggctttatcatcggcgtattgcaggactcttgcgaaaccgcgctgaactctagtactgacgtgctgttcactgcggcagcttgccaggcagaagacgatcgtctggcaaatagcgccctgcgtaattaattgtttaacccctttcgtctacggcggaaggggttttctcaactttaaacggatcaattccccttttctgcatccgccagaaacgaatgatattcaggccattcataagcagaaaactaccctcaatcatcgtgccgcctatgctccccgcccagaagttgtgaatcacccagcaacacgtactaaaccacattacgcagcgcatggtcagccctttacagcagaatagcgcccaggtactgacaatcgtgccgataaccggcaatagttcgacaggatgatggaacttcgcgaggccaattccgccagtcagcacaataaaaatcgccattacccataagctgcgcgtgcgtaaggtaatcaatgtacgaatggcattaaggatggcactggcaccagcgggataggtgcccagaagaaaaaaatgtacgccaataacggcgctatagacgctaagctgctttttgaagcgacgttcgtcacgattgaaaaatgttgtgataccaatcagaaaggcgatgacacccacgccctgggccagccaatacgcggtcatgataaatccttagcaggtatggaaaagcaaacggcgcttcacattatgaaacgccgttttttattaacaactcatttcgactttatagcgttacgccgcttttgaagatcgccagttcgcggaagtcgttacgctcgttacaggtttgcttaccgttggcaaactcaacgatggtgtcgataaattcttccagcaactgcggcatcgctttaccgtggatcaactgacccgcgtcaaagtcgatccagtgttttttcttcgccgccagttcactgttggtggcgattttcaccgtcggcacaaatccaccatacggcgtgccacgaccagtactgaacagcaccatatggcagcccgcacccgccagggcgctggtcgctacggcatcgttacccggcgcacttaacaagttcagccctggcgttttcagacgctcgccgtaacgcagcacgtcaaccacgacgctggaacccgctttctgggtacagccaagacttttgtcttccagcgtggtgataccgcccgctttgttccccgggcttgggttttcatagatcggctgatcatgggcaataaagtactgtttgaagtcgttgaccatggtgaccagtttttcaaacgttgcttcgtcgcggcaatggtccatcagcaactgctctgcgccaaacatctccggcacttcggtcagtacggtagtaccgccgttagcaatcacgtagtcagagaaacgccccagcatcgggttagcagtaataccagaaagaccgtcagaaccaccgcactccagaccaaacttcagttcgctgagtttgcctggctcgcgtttatcgttgcgcatcacgttatacagctgatgcaaatgctcgattccggcttcgatctcatcatcctgctgttggcagatcatgaaatgaacgcgttcaggatcgatatcgcccagcgtttcacggaatgcggcaacctggttgttttcacagcccagaccaatcaccagcactgcgcctgcgttcgggtggcgcaccatgttttgcagcatggtgcgggtattaatgtgatcgtcgcccagctgactgcagccgtaggtgtggctgaagaggaacacgccgtcagtaccttcggcgttgttggtctctttcagaaaacggttctggatctgccgcgcgatgccgttgacacagcccacggttggcaggatccacagctcattacgcaccccgacatcgccgttagcgcgacgatagatctgcacttcacgatctgccgcttgcgcaggcagatcctgaaaatcaggttgatagcgatactgatccagatcgctcagattcgtgcgcgtattgtgggcgtgaacgtgaacacctgccgcaatatccgccaatgcataaccaatcggcaggccatatttgatgacattggccccttttgcgatatccgttaacgcaaatttatgtccacgagcaacatcctggcgcagcgtaacagtctggttatcgacactgacttctgtgccttcagccaaatctgctaaagcgaccgcgacgttatccagcgcatggatcttgatgtattgcatatcaaccccagaccttagttcagttcaatggcgaagtagtcacgcgcattgttaaagcaaatatttttcaccatctcgcccagcaggttgatgtccgccggtgcttcgcccgcttccacccagcgaccgatcatctggcacagaatgcggcggaagtattcgtgacgggtgtaactcaggaagctacggctgtcagtcagcataccgacaaagcggctcagcagaccgagctgcgccagttgggtcatctgacgttccataccgtctttctgatcgttaaaccaccagccggaaccgaactgcattttgcccggcataccttcgccctggaagttaccgatcatggtgcccagcacttcgttatcgcgcgggttcaggcagtacagaatggttttcggcagcaggttttcttcattctgcttgctcagcaacttagacagctcttccgccatcggacggtcgttgatggagtcaaagcctacatccggccccagcagtttgaactgacgcaggttgttattacgcagcgcgccaatgtggtactgctgtacccagccgcgacgtgcatattcggcaccaaggaacaccagtaccgcagttttgaactgcgccacttcgtgctcgctcagggtttcgccagccagacggcgcgccagaatgctgtccagttccgcttcgttcgcttcagcaaacatcaccacatccagcgcgtggtcagacactttacagccgtgagcggcgaagtgatccagacgtttggtcagggcagtttgcaggtcagcaaagcggcgaatgtcggtatcggaaacttcgcccagcttcgccatgtagtcgttaaaggtcgcctgttcgatgttgaaggctttgtccggacgccagctcggcagcactttgatggtgaaagagccgtctttggcgatctctgcgtgatgctccagagaatcgatcgggtcatcggtggtgccgaccattttcacgttcatctgctgcatgatgccgcgcgcggagaagttatcctgcgccagcagttcgttacattcgttccagatttcatcggcagtactcggagaaagcaatttgccagtgataccaaacggacggcgcagttcgaggtgcgtccagtggtataacgggttgccgatagtgtgcggaacagtcgccgcccaggcgtcaaatttttcacggtcagacgcatcaccggtacacagacgctcggccacaccgttggtacgcatagcgcgccatttgtagtgatcgcctttcagccagatgtcatacaggtttttaaaacgatagtcttccgcaatctgctgcggcggcaaatggcaatggtaatcgaaaatcggctggtcttttgcgtagtcgtgatacagacggcgggcaaattcggtatctaacaggaaatcttcagtcataaacggagtcattttcgtcttcctctcaacgagtgagctagcttgcttatggtgcgatgctgacaaagttatcacaccaatttccagagtccgaagatattttcgtgagttagatcaataaacgtagttaaaaaaattactctcaaagtggtaaatctcgctgcaggccgcgccagtactggccttgctgtcgtcaggtaatgtccctacaaatattcccacatttgtgatggctctcaccttttaaagttgtatgacaagttatctttctgccgtcgcaaatcataagtcgacggaatgcaaattgccgattcattcatttgttagatgaatcgggttaaccggtacggaagccgaattagcacgaaactttcatggcaacgttcggggcgtgccggttttttttcggttacccggtcgtaactaacatcttcagcctctggcgggatgatggccgcgcttcctgcggatataacaaaacgatgaggttttacatgcgtaaaattaaagggttacgttggtatatgatcgcactggtgacgctcggcaccgtgcttggttacctgacgcgtaacactgtggcggcagctgcgccaactctgatggaagagttaaacatctccacccaacagtattcctatatcatcgcagcctattctgctgcttatacggtcatgcaaccggtagcaggttatgtactggatgtgctgggtacgaaaatcggttatgcaatgtttgctgtgctgtgggccgtgttctgtggtgcaaccgcgctggcaggtagctggggtggcctggctgttgctcgtggtgcggtcggtgccgcggaagcagcgatgatcccggcgggtctgaaagccagctccgaatggttcccggcgaaagagcgttccatcgcagtaggctactttaacgtaggttctagcattggtgcgatgattgcgccgccgctggtggtatgggcaatcgtaatgcacagctggcagatggcatttatcatctccggtgcattgagctttatctgggcgatggcatggctgattttctataaacatccgcgcgaccagaagcatctgaccgatgaagaacgcgactatattattaatggtcaggaagcccagcaccaggtgagcacggcgaagaaaatgtccgttggtcagatcctgcgtaaccgtcagttctggggtatcgcgctgccgcgtttcctggcagaaccggcctggggtacttttaacgcgtggatcccgctgttcatgtttaaagtttacggctttaacctgaaagagatcgcgatgttcgcctggatgccgatgctgtttgctgacctcggttgtatcctcggtggttacctgccgccgctgttccagcgttggtttggtgtgaacctgatcgtttcccgtaagatggtcgtaacgctgggtgcagtgctgatgattggcccgggtatgatcggcctgttcaccaacccgtatgtcgcaattatgctgctgtgtatcggtggttttgcccaccaggcactgtctggcgcgctgattacgctctcttccgatgtgtttggtcgtaacgaagtggcaacggcaaacggtttaaccgggatgtccgcatggctggcaagtacgctgtttgcgctggttgtcggtgcactggctgacaccatcggcttcagcccgctgttcgcagttctggcagtgttcgacctgttaggtgcgctggttatctggaccgtgttgcagaacaaaccggcgattgaggtggcgcaggaaacacataacgatcccgcaccgcaacattaacgtttcgtgtaagttttagtttcccttcaaagccgccttctcaggcggctttttcatcactgcgagtagagctaaactcgcaaaagtggtataacaaatatagtctgccgtatcatgcctggagcgcatatggaaatcactgaaccacgccgtttgtatcaacaacttgccgctgacctgaaagagcgcatcgaacagggcgtctatctggtgggtgataaactgcctgcagaacgctttattgccgatgaaaagaacgtcagccgtacggtagttcgtgaagccatcatcatgctggaagttgaaggctatgtcgaagtgcgtaaaggtagtggtattcatgtggtttccaaccagccgcgccatcagcaggcggctgacaataatatggaattcgccaattacggtccgtttgagttgcttcaggctcgccagctcatcgaaagtaatattgccgaattcgcggcaactcaggtaacgaaacaggacatcatgaaactgatggccattcaggaacaggcgcgcggcgaacaatgcttccgtgattccgagtgggatttgcagttccacattcaggtcgctctggcgacgcagaactccgccctggcggctatcgtggaaaaaatgtggacccagcgtagtcataacccgtactggaaaaaactgcacgaacacattgattcccgtaccgtcgataactggtgtgatgaccacgatcaaatcctcaaggcgctgattcgcaaagatcctcatgctgctaagctggcaatgtggcagcatctggaaaacaccaagatcatgttatttaacgaaaccagcgacgacttcgagttcaatgccgaccgctatctattcgccgaaaacccggtggtgcatctcgatacagccaccagcggcagtaaatgaaattcctgtccgacaggcgctgcaatgcgcctgtttgtctcgtcggtaagcgaaaagtataaagtgtcagcctgtgtaaatcctctcgccaccctcccctgcattcagcaaaatcagactccacggacatgtaattttgataacgaacaacgttgacctttgttacaattagattcaatttgaatttatgtttttgaatgctttcttatctcacgatttaacagggaatagttcaggctgtgttgatgtatcaaacccgcagaacataccaaaacagcaataacattgcggtagtgcatcttttaaaaccagcgtggcgttaaccgattcaccaggaataatgaatggaacttttgacccaattgctgcaagccctgtgggcgcaggattttgaaaccctggccaatccaagcatgattggcatgttgtattttgtcttgtttgtaattttgttccttgaaaacggcttgcttccggcggcctttttaccgggcgacagtttactggtattggtcggcgtgttgattgcgaaaggcgcgatgggctatccgcaaacgattctgctgctgaccgttgccgccagcctcggctgctgggtcagctatattcaggggcgatggctgggcaatacccgcaccgtacaaaactggctatctcatttacccgcgcattatcatcaacgcgcacaccatctttttcataaacacggtttaagcgcgctgttaattggtcgctttattgcgtttgtcagaacactgctgccgacgattgccgggttaagtgggctgaataacgcgcgctttcagtttttcaactggatgagcggtctgctgtgggtattgatcctgacaactctgggttacatgctcggcaaaacgccggtatttttaaagtacgaggaccagctgatgagttgcctgatgctgctcccggtggtgctgctggtgtttggcctggcaggttctctggtcgtgttatggaaaaagaaatatggaaatcgggggtaagggatgcaaatacctcgcatgagccttcgccagctagcctggtccggcgctgttttacttctggtcggcacgctgttgctggcctggtccgcggttcgccagcaagagtctacgctggcgattcgtgccgttcatcaaggcacaacgatgccagacggttttagtatctggcatcaccttgacgctcatggcattcctttcaaaagtatcacccccaaaaacgacactctgttaattacatttgactccagcgaccagagcgccgccgcaaaagcggtcctcgacagaacattgccccatggctacatcattgcgcagcaggacaataacagtcaggctatgcagtggctgacccggttacgggataactctcatcgcttcggataacttcctgttatccgaaacatatcactcactttggtgatttcaccgtaactgtctatgattaatgaggcggtggttaacactaccgcttcgttgtctggacaatcgttcctttgtaataggtccgaatcacaatggaaggttcaagaatgaaataccgcatcgctttagctgtttctctctttgctcttagtgccggtagttatgccactaccctgtgtcaggaaaaggagcaaaatatccttaaggagatcagctatgccgaaaaacaccaaaaccagaatcgtattgacggtctgaataaagccctgagtgaagtccgggccaactgtagtgatagccagctgcgtgccgatcatcagaagaaaatcgcaaagcagaaagatgaggtggcggaacgccagcaagatttagccgaggcgaagcaaaaaggcgatgccgataagattgccaaacgcgaacggaaactggcagaagcgcaggaagagctgaaaaagctggaagcgcgcgactactaactcacaatagtcactacttactcacctggagaaaactatgagcaaagaacacactacggaacatctgcgtgctgagttgaaatccctttccgatacgctggaagaggtgcttagcagttctggcgagaagagcaaagaagagttgagtaagattcgtagcaaagcggagcaggcactgaaacagagccgttatcgcctgggtgaaaccggtgatgccattgccaaacaaacccgtgtcgcggcggcgcgtgccgatgagtatgtgcgcgaaaatccgtggacgggcgtgggcattggcgctgcaatcggtgtagtgctcggcgttctgctgagccgtcgttaattatggcggacactcatcacgcacaagggcccggtaaaagcgttctgggcatcgggcagcgaattgtttctatcatggttgaaatggtagagacacgtctgcggctggcggtggtggagctggaagaggaaaaagcgaatctctttcaacttttactgatgctgggcctgacgatgcttttcgctgcatttggtcttatgagcctgatggtgctaattatttgggcggttgacccgcaatatcgcctgaatgcgatgattgccaccaccgtggtgttgctgctactggcactgattggcggtatctggacgctacgtaaaagccgtaagtctacgttgctgcgccatacacgccatgagttagcaaacgatcggcagctgctcgaggaggagtcccgtgagcagtaaagtcgaacgtgaacgacgtaaggcgcaactgcttagccagatccagcaacaacggctggatctttccgccagtcgtcgtgaatggctggagacaacaggcgcttacgatcgtcgctggaatatgctgctaagtctgcgctcctgggcgctggttggcagtagcgtgatggcgatctggacgattcgccatcctaatatgctggtccgctgggccagacgcggttttggcgtatggagcgcctggcgtctggttaaaacgaccctcaagcagcaacagcttcgcggttaacttccctctggccggagccattccggccttatccctcaaattttttgaagatttttgacagttttccttgctaacaatcatcattcaccacgtttatgattctctccatcgacagcaacgacgctaataccgcgccattgcacaaaaaaacaatcagcagcctgagtggcgcagtggagagtatgatgaaaaaattagaagatgttggtgtactggtagcgcgcattttaatgccgattctgtttattaccgctggctggggaaaaattactggctacgcgggtacccaacaatatatggaagcaatgggcgtcccgggttttatgctgccactggtgattctgcttgagtttggtggtggtctggcaatcctgttcggtttcctgactcgcaccacagccctgtttactgcgggctttacgctgctgacggcatttttatttcacagcaactttgctgaaggcgtcaacagcctgatgttcatgaaaaacctgacaatttctggcggattcctgctgctggcaattaccggtccgggcgcgtatagcatcgaccgcctgctgaataaaaagtggtaagcacgcgctatacttaacgataaaaaacgaggaggaagctcctcgtttttgctattggaggagagaaaaatgggtcaactgattgacggcgtctggcatgacacctggtacgataccaaatctaccggcggtaaatttcaacgtagtgcttccgcatttcgtaactggctcactgccgatggcgctcctggccccactggcacaggcggttttatcgcagagaaagatcgttatcatctctatgttagtctcgcctgcccgtgggcgcaccgcacgctgatcatgcgcaaactcaaaggactggaaccgtttatttccgtttccgtagtgaacccgctgatgctggaaaacggttggacctttgatgacagttttccgggagcaaccggagacacgctctatcaaaatgaatttctgtatcagctttatctccacgccgatccacactacagcggacgagttactgttcccgtgctgtgggacaaaaagaaccacaccatcgtcagcaacgaaagtgcagaaatcatccgcatgttcaataccgcgtttgatgcgctgggcgcgaaagcgggtgattactaccctccagccctgcaaacaaaaattgacgaacttaacggctggatttatgacaccgttaacaacggcgtgtataaagctggttttgccaccagccaggaagcttacgacgaggcggtggcgaaagtgtttgaaagcctggcacgactggagcagattttaggccagcatcgttacctgaccggcaaccagctaaccgaagccgatattcgcctgtggactacgctggtgcgttttgatccggtgtatgtgacccacttcaagtgtgataagcaccgcatcagcgattacctgaatctgtacggttttctgcgcgatatctaccagatgccggggatcgccgaaacagtcaatttcgatcatatccgtaatcattacttccgcagccataagaccatcaaccctacggggattattagtattggtccgtggcaggatctcgatgaaccgcatggacgagatgttcgcttcggttaaaaaaaggcaccttacgaggtgcctctgataattagctaagtgcatgttgttcatgtcggatgtggcatgaacgccttatctgacatacaaaacattgtacattcaatagattgcataacccgcgcagaccagataagcgtagcgcatctggcgattttgcgcttgtcatcagtcttagcgcgccttcacggcactttattaattccttgaacgaatatttactgccatttcattcacgtctattcttaatttgctgctttaaaaacaagtgattgagcaaaattgaggcaaaaatggactggtatctgaaagtactaaaaaattatgtcggtttccggggtcgtgcgcggcgcaaagagtactggatgtttattctggtcaacatcatctttacgttcgtgctggggctgctggataaaatgttaggctggcaacgcgctggtggcgaaggcatcctgacgacaatctacggtattctggtgtttttaccgtggtgggcggttcagttccgccgcctgcacgacaccgaccgcagcgcgtggtgggcactgctattcttaatcccgtttatcggctggcttattatcatcgtctttaactgccaggcgggtacgccaggcgaaaaccgctttggaccagatccaaaactggaaccttaaaacaaatctgctcgccggatgtctgactcatccggcttttatcattatgttgatgaatgaataatttactaatgtttatttaaaatatttcaatgtcgttatataaattacctataaaaaataaccatgtatttatcttaaatatcaaaacctttataacatccgaaaaagaaagatacgaatagcatttacacaatacccggaatagactttcgtcacttttaattaaagggatgtttttatgcagtggtatttgtccgtattaaaaaattatgttggtttctctggtcgcgcacgtcgtaaagagtactggatgtttactctgattaacgccatcgtcggcgctattatcaatgtcattcaattgattttaggtctggagcttccatatctgtctatgctttatttgctggcaaccttccttcccgtccttgcgcttgctatccgtcgcttacacgataccgaccgtagtggtgcctgggccttgctcttttttgttccgtttattggctggctcgtgcttctggtttttttctgcacagaaggtacttctggcagcaatcgttacggaaacgatccgaagtttggtagtaattaatcttagaattggggcgatatttcgcccctttttattaacaataataaatattattttccgttaaaaagtttgggaatttcccgcagacaccaggatttcgcttcccccatactgtcacgacgccaggccataataatatcgatctcgctggtgctttccgggctgacgacacgcaaccgcccttccgcaatatctttttcgaccataggatacggcatcgtcgccacgccaagccccgccagtaatgcctgacgtttatcttcaatcgtgctcaccgttaagcgcggctgtttgtccagcagctgtacggtcaacaccgggcgctcacgagcggtatccgccaccgcaattccacgatatttcacacgcgtcacttcagataacggttccggctcctgatgaatcgggtgatcaggcgcggcaacgtagacgttcattaacgtatagagcttgcggctgttgatctcgctgctggaacgaaaatgcatatccggcgcgataacaatatccgcccgcccctgctccagccgttcccacgcccccgccagcacttctgtgatgattgccagttgggtattggcttttgccgccagtttgtcgattaacgggaaaaaggcaggtgtcggtaccagcgcttcggtcacaatggtgagatgcgtttcccaaccgcgcgcgagagcttccgcatcagtagtcagtttatctgcggcttccagcaaaacgcgccctcgctccaacaacatcctcccgacattggtgaatttggtacgatggccgctgcggtcaaacagcaccacatccagctcttcttccagtttttgcatggtgtagctaagtgcggaaggcacgcgtcccagctcatccgccgccgccgcaaaactgccccggcgatcgatcgcatccataacccgtagtgcttccagcgttaatgccctttctttggccatttcgttctcattcaggaaatttgaacataccgggcagaatatctggctaacaatgtagcgtccagccccttaccataaaaggaagtaaagagaggtcaagaattatgattactacccgaactgccaggcagtgtggacaagcagactacggatggttgcaggcccggtatactttttcctttggacactacttcgacccgaaattgttaggctatgcctccctgcgtgtgcttaaccaggaagtgctggccccaggtgccgcctttcagccgcgaacctatcccaaagtcgatattttaaatgtgattctggatggagaagcagagtatcgcgatagcgaaggcaatcatgttcaggccagcgccggagaggcgttgctgctctctacccagccgggtgtcagctatagcgaacacaatctcagcaaagacaaaccgttaacgcgaatgcagctttggctggacgcctgcccgcagcgagagaatccgctgattcaaaagctggcgcttaatatgggcaagcagcaattaatcgccagcccagagggtgcgatgggaagcctgcaattacgccagcaagtgtggctgcaccatatcgtgctcgacaaaggcgaaagtgcgaatttccagttgcatgggccacgcgcgtatttgcaaagcattcacgggaaatttcatgcgcttacgcatcatgaagagaaagcggcgctgacctgcggtgatggggcgtttattcgtgacgaggctaacattacgctggttgccgattccccactgcgcgctttgctgatagatttgcctgtctaattgtttttacagggagatgatgatgagtaaaaaattggccaaaaagcgccagccggtgaagcccgtggtggcgaaagaacctgctcgcaccgccaaaaattttggctatgaagagatgttgagcgagctggaagctatcgtcgcggatgctgaaacgcgtttagccgaggatgaagctaccgcgtaaagacaggttgccggatgcggcgaaaacgccttatccggcctacaaaatccaacaacattaacgaattaaacaacccgtaggccggacaagatgcgccagcatcgcatccggcacgatccccaaaacctggcgtttatctggccttgctcgccataatctcgataatctgccgatccgtttgctgcatgctatggcttgctaacgcacacaggttggcaatgctctgctcaacatcatgcgccacaatcccttcattgccggtcacggcggtatcatccagcgccattaacaccgctttccacgcagcgctagcactggtgctaaccttcatcgcgcagctgttgctcgcaccatcgcaaatcatgccgctgacatcgccgatcatactgctgatcgccatgctgatggtttcataacgcccatccaccagccatgccatcccggcggcggcccccattgctgcggtcgttgcggcacacagcgcagacaaacgcggtaactggttatggatgtaaattgcgctcaaatggctaagcatcagcgcacgcgccagccgttcatcatccgctccgaagtgttctgctaccaccaccacaggcattgttgcggtaatcccctggttaccgctgccggagttactcatagccggaagcgtagcgccgcccatacgcgcatcggatgccgcgctggtacgaatcacaatggaactagagagatctttcgccagcaaaccgcgctcgcactgtttttccagcgtcgcgccaatatgcagcccccacttaccgctcaaaccttcctggcttaacgcacaatttagcttcgcggaatcgagaataaagcggatcgccgcaaacgggacttcattgacgaacttcaggatctcagccagcgtcgttctggaaagcaccgtcagcggagactcttgctcgccctctgccacacacgcctgctgggtaaacaccacaccatcgtgcgtctcgatatgcacaatgttggtatgcccgccgacgatggtgacacacgcccacttctcaccgttccagactttggcgcgactgaagaggatttcatcgcaaggttcctggatcttaacggagactttccccgccgccagcagtgctttggcatcggcaattgcctgcgctgttgcgtctttcagcacttccagcccggcgttggcatttccacctaacgcccccagcgccgccgcaatcggcagccccaccattcccgtgccgggaacggtgacgcccagaccgttcttcatcagatttgggctaacccaggcttctacacgttcaaccggaccttccagttctgccgcagcaaccgccgccgccagcgccagactaatcggttcagtacatcccagcgccggttttacttcctcctgaacggcgaggatgtaacgctgccataacggatttaaagtgctatcaaacatattaaaaaccttaaaatttcaggtaaatcaagaaaatgccaggaacggagaaacacacagcaacaaaccagtgacgataatcaggtacagagacatccctttgtatttgtgcaatgctggtactttgtaaaccagccacgccgggatcaggcaccctaccatgccgaaaatcgggctacagatagaggtgaagctcaacaccggtgcgttcagtacgatggcgctccaggccagcaaaatggcgaaaatcatgatgccgcgctgaacgagattttcgttaatcttctcggcaggcatcttgcgacgcaggatgttcattacgatcccttgcgttgcttcgcgaaagcctaaatagacgccaaagaatgcagtcatgacagcaaagatattgagaatgacgctgaccactttcacccacgctgcgccgtcaccgctaataaactgtgcggcaatcgccagcgcggaaatattctgctcataggcttttaccgcttcgtcatgtcccatcgccagcgtgaagctcacggcgtagaaaaagacggtgacaaacaaaatgccaaacgcgatattcattgcccgcaatgctttatgccgcgccacttcaatacttttttcccggctgcgataagagatcaccatcggacttaacgtctggataaacagaatgctcgtcagggtaaacggcagcgtaataatggcgtttttcaccagcagccccagcggcggtaggctaccgacgttatacagatgccacattcccaccatgctcacgcccagcgccgcgaccaccagcagcttggtcagcaccatgccggtgctaattttgaataacaatttctcgccgcgactggagatcgccaccagaatgcaaatcagtaccagaccataaaagggactgtcactcagcaacccttccgtcacgccgaaggtatgcaggtaggaagcactatcgttggtgatggcggtggaatagacgaacatccaaatcaccagcattacgaaatagagcgcacctaacaggatgccccagtttttacctaaataaccgctaatgacgctcgggtaatctttacattctggactttctgccagcgtattaataaacaatcgctgaaacagatacattgccgggtaaccaatcacgctactgagcaaaaatacccacaatcccatcaaaccgacctgcaccgggagaaaaacaatccccgcgccaatcgccatcccgatactcataatcacccagccggtgtcagtactgtcgaatttgatcgcttctcgccactcgctctcactcattccagcacgacccgccggggtcgaagcgtctgcaatgacgcctttattcgatgcaatttccataatttctcgctcaatattttgtagggcttattatttttttccgagccgcatcaaggcgatatgcggtctacgtttttgcaggcgagttattagaataaagaaatgatacgcgcgaggtcagagaaaatcttcacaatcaagactttgaaataacggagatggataagaattttctactaaattaatcgcaggagaatattcattctctatttgcggcagatcacaaaaaaaaggtgcacatttgtgcacccaaggatgaaagctgacagcaatgtcagccgcagaccactttaatggccagtcctccgcgacttgtttcgcggtatttatcgttcatatctttgccggtttcatacatcgtctcgatcactttatcgagactaacacgcggtgcgctggtgcggcgcatcgccatccgcgcggcgtttactgctttcacggcattaatggcattacgttcaatgcacgggatttgtacctgtccggcaaccggatcgcaggtcagcccaaggttatgctccatcgcgatttccgccgcattgcatacctgcgccggactgccgcccagtagttcagttaaccctgccgccgccatactacaggccacgccaatctccccctgacagccgacttccgcgccagagatggaggcgttcattttatacagcgcgccaatagcccccgcggccagaaaatagcgggcaatactccgctcgtttaccggacgacggaacttatcgtaataagccagtactgccggaataatgccgcacgcaccgttagtcggtgccgttaccacgcgcccgccagctgcgttttcttcactaaccgccagcgcgtacatgttgatccagtcgatgacattcatcggatcgttagagatgttatcgctggaaaccagctgacgacgcagcgctacggcacggcgcggcacattgagcggaccaggcagcacgccttcagtgttcatcccacgttcaataccgtcatgcatcacttgccagatacgggcaaaaccggcgtcaatttccgctttgctgcgcagcgctagctcgttgtgcatcatcagaccagatatagacaggccgttgtaatcacacattttcagcagttcacctgcactgtggaaatcgtaaggtacggacgtttcgacatcgtggctcaggccgaagtgttcttcttcgacaataaacccgccgccgacagagtaataggttttacttaatagctcttcctgtcccttccaggcagtgatccgcattccgttctcatggcgaggcaacatttcgggatggaagataatgttctttgctacaggaaaatcaacaatatgcgcaccagatgccactggcagccgcccgctgcgcgttactaactctataaatgcagggatctcatcaatgacaacatcctgcggactgtttcctgccagtcccatgatgatggcgacatccgtggcatggcctttgcccgtcagactcaagctcccgtacagatcgaccacaatatggctcgtcgcggttaataagccgctactttccagccgatcaataaaactttttccggcattcattggccccacggtatggctactggagggaccaatcccaattttgaaaatatcgaatgcactaatcatatccacaccctcggattgccgttcagtgaagtggagcggaacgaccttacgaccgtcccgctcacgaggctttacgcactacgtactgcgatggcttcaatttccagcttcacatctttcggcaaacgcgcgacctgcacacagctccgggtcggataggtcgcctgatgctcatcgaagaactgcttatagacttcgttgatggtggcaaaatcattcagatcggtgataaacacggtcatcttgatgatatcgcccacgctcagcccggcagcaaccacgatcgctttgacgttttcgaggcttaaacgcgcctgatcttgcacatcagccgggatctcaccggtctgtgggcaaaccggtatttgcccggaggtgaagaccatgctgcctaaatcaacgccctgaacataagggccgattgcgcctggggcacgttgcgtttcgataatctttttcatacatcctccggcgtcagagcgcctgggtaaaggtacgactaataacatcctgttgctgttcacgggtcagtgcgttgaagcgcacggcgtagccagagacacggattgtcaggttaggatatttttccgggtgctcgatggcatccagcagcatttcccgattcattacgttgacgttgaggtgttgaccgccttcgacatccgcttcgtggtggaaatacccatccagcaggccgacaaggttggttttacgtactggatcttctttgcccagcgccgcaggaacgatactgaaggtgtagctgatcccatctttggcgtaggtgaacggcagtttcgccacgctcgtcaaactggccacggcacctttgcggtcacgaccatgcatcgggttagcgcccggcgcgaacggtgttccggcgcgacgaccgtccggcgtattaccggttttctggccgtacaccacgttagaagtgatagtcagaatgctctgggtagggacggcgttgcgataggttggcagcgctttaattttcttcataaagcgttcaaccaggtcgcaggcaatgctgtctacgcgctcgtcgttgttgccgtactgcggatattcaccgtcgatttcaaagtccaccgccaggccgttttcgtcacggattggtttcacgcgggcatatttgatggcagacagggagtccgtcgccacgctcaggcccgcgatgccgcatgccatagtgcgatagacatcacgatcgtgcagcgccatcaggctagcttcgtagctgtacttgtcgtgcatgtagtgaatgatattcagcgcgctgatgtactgcaccgccagccagtccatgaagtgatcgaggctgtccatcactttgtcgtaatccagcacgtcgtccatcagcggtgctgttttcggcccgacctgaatcttcagcttctcgtccaccccgccgttaattgcgtagagcagcgttttcgccaggttagcgcgtgcaccaaagaactgcatttgcttaccaatcaccattgggctgacgcagcaggcaatcgcgtaatcgtcgctgttgaagtcagtacgcatcagatcgtcattttcatactgcaaggaagaggtgacgatgctcacctgcgcggcatattttttgaaggcaatcggtaattcttcgctccaaagaatggtcaggttaggttccggtgccggccccatagtgtgcagggtgtgcaaatagcggaaggagtttttggtcaccagcgtacgaccgtccagccccatcccgccgatcacttccgtcgcccagattgggtcgccggagaacaggctatcaaattccggtgtacgcaggaagcgtaccatacggatcttcatgatgaagtgatcgatcagttcctgtgcctgctgctcattgagtacgccagctttaaagtcgcgctcaatgtagatatcgaggaagcttgccgtgcggcccaggctcatcgcgccgccattttggcttttcactgccgccagataagcgaagtagagccactgcaccgcttcctgcgcattctgcgccgggcgagagatatcaaagccatatttcgccgccatttcctgaatctgcaacagcgcatgacgatgctctgccagctcctcacgcagacggatggtggcttccagatcctcgcctttttccagacgagactggagatcggcaaattgcagttcgcgttcacgtaccagataactgatgccatacagcgctacgcggcgatagtcaccgataatgcgcccacggccatagccatctggtaaaccggtcagcacgccagatttacggcagcgcagcatatccggactgtaaacatcaaatacgccctggttatgggttttacgcagatcggtaaacagatattcaaattcactgtccatttctcggccataggcgtggaaactacttttaatcatattaatgccaccgaacgggtgtagcgcacgtttcaacggcgcatccgtttgcaggccaacaattttttccagcggctggttaatatatcccgcatcatgagcggtaattgtggtggcaatattggtatcgaaatcaaccggcgcgtgggttgcattttcgatacggatgccttccattactttttcccacaattccgtggtggcaggcgtcgcttcggcgaggaaagattcatcgccttcatacggtgtatagttatgttgaataaaatcgcggacattaatttcgtttttccagtccgtacctttaaagccaagccatgcgtcggcgtacagcttatcgctggtatcaatatctaccttcatgaaaaataatctctctacaatacttcaactaaattatgcaaattctgcgggcgcgttaactttgcctaaatgaatggcatccaaagcaatcattttttcttcgttagtcggaataacggcacaaatgacacgcgcattttcactggaaacaattcgctcaccacaggagttagagcgattattcatttctgtatcaatctctaagcctaatacagccaaatgttccatgaccagacgacgaattaagctactattctctcctattccgccggtgaatataattccatccaggcgacgtaaactagctgcgtgtccggcaatatgacgggcaattcggtgaacaaaggttttaattgccagttgcgcgcgttcgtgaccttcatgccaggctttttccagaacacgtaaatcgctagaaagaccggaaatacctaataatccgctctctttattcactacgcgttccaggtcacccaggctctggttggtttggctggcgacccaggacatcgcaccaaagtcgacatcgccactgcgggtacccatcatcaagccttccagcggcgtcattcccatactggtatcaacactctgaccgttgcgaaccgcgcagatactcgcgccattgccaagatgcgccacaaccaggccggagtcatcttccgccagattcagcaggctatgtgcgcgctgggaaacatagcggtggctcgtgccgtggaaaccataacggcgtacacctaactcttcataatatttccacggcaggccgtataaataagcttccggagccatcgtctggtggaaactggtatcaaataccgccacctgagttacgcccggaaataattgctgcgcgctttcaataccacttaaattggcgtaattatgcaggggtgccagtggagaaacgcgacggatattatcaatgacttcatcggtaataatggcggactcggtaaaaatactgccgccgtgagcgatgcggtggccaattaaggccacactgtcatttaaattccgtttttccagttcaaatgcaattgccttcaatgcaccttcgtagctgtggtgagccagcggtgctggctctcccccatttacggataagaatgcattttcgctgttaataccgtcggcaataccactcattaatacttcacagtcgctggcatcgagcacggaaaacttaatgctagagctaccacagttaataaccaaaacaaccggaaattcattcatctcttttctcatcctgagttacggattaaaacagtttgtatacgatgttcaggatggtcagcagaccaatcacggtaacaaacacgttatccagacgaccacggtatttcgccagagacggcgctttacggatggcatacatcggcaacaggcacagcagggatgcgataatcggtgcgcccatggcttcaatcaggtcaaggatgttcgggttggcgtaggcaacaacccaggtggagcccatgatgaagatcatgctgatagtgttcagtttacccaggctcactttagttttgtcgcctttataaccaaacttcaggaccaggccattcagaccttccagcgttcccagatagtgaccgaagaaagatttgaagatagccacgagtgcgatgatggaagccgcatattccagtgtaatcgcgaacgttgttttggtaccggtcatggacgcaaagtggttagccagataagaaagcactggaatattctgcgctttggcttccgccatgttggccggagacagagtaaacaggcagctaaaggcaaagaacatcaccactgcaaccatcagcatgctggcacgagaaatgatttgggaacatttacgttcggtgaagtcgcgaccgaagtctttctcatactcttcacgcttagaaaccacgaaggaagagacgattgggctgaagttaaaggagaaaaccatgatggaaatccccagccagacagtgatcaggataccgtcatgaccggttaagctcaggctaccgaggtcaacctggtcgataactgcagagttccagtaagggatcaggctcaaagaaatcagcaccaggctggcgataaacggccataccaggtagctcatcactttaaccatcagatccttaccaaaccagatgacgaaagccatcagcagcaacaggaacagcgccacaaagccgcgattcagcggtgcaaagccgagctggttttcccagaacgtcataaaggtattggtaatagtaacgccataaatccacagcagtgggcaaatcgcgaagaagtacaggaacgtgataaccacgccgccagttttaccaaaatgctcttccaccgtttccgtaatgttgccggaagggttagagccagaaagacacagacgcgccagcgcccggtggcaataaaacgcgatggggtatgccaataccaacatcagaagaatcgggatcagtccgccaaaacctgcgcggatagggaagaacagcaccccggcgccgattgccgtaccaaacaagcctaacgtccatgtggtatcacttttacgccaggagctttgttttgtctggctggatacaatgctatcactagtactcatatcctatcctcaacgaattaattaagcgtcaacgaaaccggtgatttgagagacgcgagaaagatcgatattgccgccggaaataatactgacggtttttctgttttgaatatattggtctaatttaccgcttaataatgcagcacatgccagagcgcctgcgccttcggtgacgactttattgcgctgaattaaggcaatcatactgtttctgatttcgtcttcgctgaccagcacgatgtcatcgactaattcacgaacgatttcgtaagttaaattacccgggcgggagacatcacaaccatccgccagggtgccggtagttcggtgcgtggttatttctccggagtggaaagaagccgccatgccgtgaacgttttcagactgtacgccaataacacgaatggtcgggttaatagatttaattgccaccgcaataccagcaattaaaccgccaccaccaattggcacaatcacgttatcgacatcatagagatcttccataatttccagaccaatcgttccctggccagcaatcactttcggatcatcgtaaggtgggataaaaatacggccttccatttcgacaatttcgctcactttagcgatagtgtcgttgaagttatcaccatgcagaacgacttctgcggagtagtcgcacgttgccgctactttggattttggcgcaccttttggcatcaccactttaccgtcgatacccagcatcgcgcaggagagggaaaccccttgcgcatggttgcccgcagaacaggccaccacgcctttgcgtttttccgcatcggtcagactacttaatttattaaatgcgccacgaattttaaaactacccgtacgctgcatattttcaaacttcaggaatatttcacctttgcaacgttcactaaaatagttggagcgaggcatgcctgttttataaattcgcccagccagtcgttgtttcgcttcaataatgtcatcaatagcaaccggcagatcgtatgtaatatgcattataaaacctcttcgcctgaattaaatatgtaggtaaccgtaaccgacacctgcaagacagacaggtggattatttatgtttaaataaaaacaaataattaaccaacttctattaattgccttcgtctacacccattataagaactatactctttggctaattccaccaaaacgcttgctgcttttttaatacgataatttttgctccataccgcggcatattgtgccacaggtaatgtttcttcaaccggaatagtaataaattgattagaaccaaaaggactcgtcatatcacaaggaattacagttaagaaatcagcattgagaacaagattataaattgtcacgacactgtcggttttaacgatgttttcaatactgatgccatttctttgtaacgtagtaagcagttcgctgtagtaccccatattagtttgtggcaacacccactgttcgttcttcaagctctccagcgtggtggtgccggtgcatgttcgggacttactggctaccagcacaaactcggactcgaacagcggctcaacatgtaaatcctgaagcttcatttctgcacttaacgtaccaatcgcaaaatccagtcgaccgtcgcggattgccggtaagaagctagacagttgcgcttcatacatagaaacctgcgctttcgggaacacctctttgaacttgttgatcatcccactcataaaagtaaaaccaatcaaactaggaaaaccaaaactgacttccaccaccgcctcagaagacataccgcttatctcattaaccatatttttcatttcacgggtaatggattcggaacgggagagtaacaattgaccggcaggtgttaatgttacaccggtatttttccgcaccactaattccacaccaaaataatcttcaatatcgttaatgattttactgacggccggttgagttaaccctaattcttttgcagcgctgccgatagaaccacttctaatgacttcctgaaagactaccaggtgctgcgttttcggaagaagaatagtgctcataacgacctacgttaattacctcattgacggcatgaagtgtatcaaaatgaaatgaacaggatatgtgcgaccactcacaaattaactttcaatactttccagagtatcgttattacaattaaatacctttaaatatcaacaagttaaagtataaaaatcagcataaaccctgatttttgtcaaaaaaaatgacggggataaccatattttatggcgataacatcattcgttatgtggttaatacaaaaaaggggctgagaccatatttcaagcaattaccggataattaccaggcaaaatttgagttaaatttaatgagcaagttcagtaattttattataaataaaccatttagtgtgataaataatgcggcatgtcacatttttagtcgctatttgttggagaacaaacatttattttatcaatattttaaaattagcaatacatgtattgatcatctcgaacaattgattaacgtcaactttttctcttctgacaggacgagtttttgtgaatgcaatcgttttccataaattcttctcccctcataggcgacgaatagcattttgtgttgaggattacaaaacgaataattgctgatcgccgcgataaggtcagacaaagacaacaagggaaattttcacagagcttttgatcggcgtaggccacagaatgttgcttcgtttactgtaacgccgggtaaatgagcgttttttgatagtgcgaaagaaccctgcgaggaaaataagcatctattattgtttgtcatgatgacaaggcaggcatcaatgaaaggcttcccaattgcgcatatttttcaccctagtatcccgccaatgcacgcagtggttaacaatcacaatagaaatattgattattggacggtaaaaagaaagtttgcagaaattgtctccaccaatgacgttaataaaatttacagtataagtaatgaactgcggagagtattatctgcaataactgcattgaatttctatcatggcgatgttccttctgtcatgatccgaatccaaccggaaaatatgagtccattcattatagatatttctacaggagaacatgatgattatatcatacaaacattagatgtaggcacttttgcaccttttggtgaacaatgtacttgcagtgccgtcaataaaaaagagctggaatgtattaaggagacgatttctaagtattgtgcaaaattcacccgaaaagaagccatcttaaccccccttgtgcactttaataaaaccagcattactagtgattgttggcaaattctcttttttagtcccgatcattttaataatgatttttattgattatttataaaggataaaataatgttccctgttagtagtattggtaatgatattagtagtgatttagtccgtcgaaaaatgaatgaccttcctgaaagcccaacaggaaataacctcgaagcactagcaccaggtatagaaaaactaaaacagacctctattgaaatggtcactttacttaacacgttacaacctggtggaaaatgcattatcactggtgattttcaaaaagaattagcgtacttacaaaatgtaattctttataatgtcagctctcttcgtctggattttttaggttataacgcccaaattattcaacgaagcgacaatacttgtgaacttaccattaatgaaccgttaaaaaaccaggaaatatccacaggtaatatcaatattaattgcccattaaaagatatttacaatgaaatcaggaggttaaacgtaatttttagttgtgggactggagatatcgttgatctatcctctctggacttacgtaatgtcgatttagattattatgatttcacagataaacatatggctaatactattttaaatccttttaaattgaatagtacaaattttactaatgccaacatgtttcaggttaattttgttagtagtacacaaaacgccacaatctcctgggattatttactaaaaataacgcctgttttaataagcattagcgatatgtattctgaagaaaaaatcaagtttgtcgaaagttgtttaaatgagcctggagacattaccgaagaacaattaaaaattatgagatttgcaattataaaatctataccaagggcaactcttacagataaattagaaaatgaattaacaaaagaaatatataaaagcagtagcaaaatcatcaattgcttgaacagaattaaattaacagagatgaaagaattcagtagtgaaaaaatatatgattacatcgatataatcattgaagattatgaaaataccaaagaaaatgcttatctggtcgtcccccaaattaattatactatggatttaaacatagaagactctagcagtgaagagttacttagtgataataccctcgagaaagacgaaaattctccggacaatggctttgaggtcggggaatataacacatatgaagcatataacagtgagaagcaatattttaccagagaggactatacgtatgattacgaccttttaaatgcaatataaacttaataacttcttacaaagtctattattaataccgtagatatttattcatcttaccctgtgcaccaaaagcaaaaactcactgacgcgggtttgaaactgatggcaaccgcaaaaatgcctgatgcgctacgcttatcaggcctacgccatctctgcaatatattgaatttgcgtgcttttgtaggcaggataaggcgttcacgccgcatccggcatgaataaagcgcactcaacaatctgaaacccgccggaacggtttattacgtacatcaggtaaaactgaccgataagccgctttcttttgggtatagtgtcgtggacagtcattcatctttctgcccctccaaaagtaaaaacccgccgaagcgggtttttacgtaaaacaggtgaaactgaccgataagccgctttcttttgggtatagtgtcgtggacagtcattcatctttctgcccctccaaaagcaaaaacccgccgaagcgggtttttacgtaaaccaggtgaaactgaccgataagccgctttcttttgggtatagcgtcgtggacagtcattcatctttctgcccctccaaaagcaaaaacccgccgaagcgggtttttacgtaaatcaggtgaaactgaccgataagccgggttctgtcgtggacagtcattcatctaggccagcaatcgctcactggctcaagcagcctacccgggttcagtacgggccgtaccttatgaacccctatttggccttgctccgggtggagtttaccgtgccacggactgttaccagccgcgcggtgcgctcttaccgcaccctttcacccttacctgatcccgcttgcgcgggccatcggcggtttgctctctgttgcactggtcgtgggtttcccccccaggcgttacctggcaccctgccctatggagcccggactttcctcccctccgcccgtctcccccgaagaggacgacgacgaagcggcgactgtctggtcagcttcggcgcgcagtatagagggtttgcgcgcccttgtcaccccgcgttgcgcattccaatcgccagtgtcgcggcgatattacgactagcacggcagatattgtcataagccccgcggaatgcttcgtccaacgtacctatgctggtcaatacgctgaagaccgcatcaatgccatgctgatgtacaacgccaacatcatcggtcaggctacccgcaatgccaatcaccggtttatggtacttcttcgccacgtttgcgacaccaatcggtaccttcccgtgaatactctggctgtcaatacgcccttcaccggtgatcaccagcgtacaatcgtgaatatgttcctccagattcagcgccgtagtgacgatttcaataccacttttcagttccgcaccaagaaacgccattagcgccgcgcccataccacccgcagctcctgcaccggggacatctttcacatcaacatgcagcgcttttttaatgacctcggcatagtgagagaggttattgtccagctcaacaatcatcgcttcactggctcccttttgtgggccaaagatgcggcttgcgccgttatcgcccaccagcggattggtgacatcacaagcgacgcgaatgacgcaatcttttaagcgcggatcgaggccggaaatatcaatatcattcagagtattaagactaccgccgccaaaaccaatttcattgccgttggcgtcgcataatttcgcccccagcgcctgtaccatgcctgcgccgccatcatttgtagcgctgccgccaatgccgataataatgtttgtcgcaccgctctccagcgcctgcaggattaactcgcctgtgccgcgactagtggtcacgagtggatcgcgtttttccgcaggtaccagctccagcccactggccgccgccatttcaataaacgcggttttgccatcgccggagatcccccaactggcattcactttctcgcccagcggccctgtaacccaggcgtgacgttcagccccctgggtggctgcaatcatcgcttccaccgttccttcgccaccgtcggcaaccggaacagaaacgtactgtgcatcaggaaaaatttcccgaaatcctttttctatcgcctgcgcaacctcgctggcagataaactttctttataagagtctggggcgattacgattttcatacctatgcctgttaccacatgacgccggagggcgtttctcttattcggcctggattccaggcccggattgcaatacgccatccgggcacgacgtcattaacgagtaacttcgactttcgccagtttttcgtagtagcacgccagggcgctatgatccgccgttcctaaaccatctgctcgcagtgcctgcatcatctccataaccgcagctgtgagcggcagttgtgcgccgacgccgtgagaagtatccagcgcattcgccagatccttaatatgcagatcaatacggaagcccggcttgaagttgcggtccatcaccatcggcgctttggcatccagcacggtactgcccgccagtccaccgcgaattgcctgataaaccaggtccgggttaacgcccgctttagttgccagcgttaacgcttcactcatcgcggcaatattcagcgccacaatgacctgatttgccagtttggtgacgttacctgcaccgatttccccggtatgcaccacggaacccgccatcgctttcatcaaatcatagtatttgtcgaaaatagccttgtcgccgcccaccatcacactcagcgtaccgtcgatggctttcggttcaccgccgctcaccggagcatccagcatatcaatgcctttcgctttcagcgcttcgctgatttcacggcttgccagcggtgcgatagaactcatatcgatcaataccgtacctggcttcgcgccttcaataatgccattctcacccagcgccacctctttcacatgaggggagtttggcagcatggttatgatgacgtcgcactgttcagcgatcgctttagccgtagacgctgtttctgcacctgcagcaatcacgtcagcaatagcttctgggttacggtcagcaaccaccaggctgtaacctgctttcagaaggtttttactcattggtttacccataatccccaggccaataaaaccaactttcatagtcatatcaatcatctctcttgttgcggtggtggttattttttaaaggtatcagccagtttctgagtggcagagcggaagacgccgagatcgctgccgacagccacaaacgtcgcgccccattccagataacgacgcgcatcggcttcgaccggcgcgaggataccgctgggtttgccgtgcgcgctggcacggttaaaaatgtgctgaattgctttttgtacatccgggtgacttgcattgccgagatggcctaatgccgcggccagatcgctggggccgacgaagatgccgtctacgccttcggtagcggcaatggcatcgacgttatctacgccctgctgactttctatctggaccagaatagtgatgttcttgttgctctgagcgaaataatccgccacggtgccaaacatattggcgcggtgagaaacggagacgccgcgaatgccttccggtgggtaacgggtacttgccaccgccagctctgcttcctcttttgtttctacaaaaggaatcaggaagttatagaaaccgatatccagaagacgcttaataattaccggctcgttggtcggcactcgcactactggcgcgctggcgctgcctttcaaggccattaactgcggaataaacgtggagatatcgtttggcgcatgttcgccatccagcaccagccagtcaaacccagccaaaccaagaacttcagtgctaatcgggttagagagtgcactccagcaaccaatttgtacctgtttcgcagccagtgcggctttgaatttattcgggaaaacatcgttattcatcgcttatacctttgcttatttctgcaattccatacgtttaatgtcgccaactacgaagaggtagcagaccatcgccatcagcgcactacatcccacgaaaaccagtgctgcattgaaggagtgcagttcacttaccaggtagccaatcaccagtggagtgacaatggaggcaacattgccaaagacgttaaagacgccgccgcagaggccaacaatctctttcggcgcggtgtcagaaatcaccggccagcccagcgcaccaaatcctttgccaaagaaagccagcgccatcagcatgaccaccagcgtggtgttgttggtgtagttacataagatgatggtggaagccagcaacattcccagcacaatcggtagcttacgtgccagggtcagggataaaccgcgtttgatcagataatcgctgaagacacctcccagcacgccgcccgcaaaaccacacagtgctggaatgctggcgaccagacccactttcagaatgctcatgcctttttcctgcaccagataaatcgggaaccaggtgaggaagaaccaggtgatggtgttgataaaatattgtccgaaaaatacgcccagcatcatgcggttagagagcaattgcttgatgtaatgcagtttgggtccgcttgctgccgcactgcccggctttttgtggtccatatcgaccaccgcgccattttcagagataaacttcagctcttccgcagacatacgtgggtgatctgtcgggttatgaatcaacttgatccacagcgccgtcagcacaaaaccaatcacccccataacggtaaagacgtgctcccagccccaggcgaaagtcagccagccaagcagcgggctaaagagcgccaggctgaaatattgcgcgctgttaaagatggcggaggcagtaccacgttctttcgtcgggaaccaggcggcgacaattcgggcgttcgccgggaaacttggcgcttcgctgaagccgagcataaagcgcataaagaacatggagatccctgcccaggccagcgggaacatatcaacaaagccttgcaggaaggtgaataggctccagaaaaagaggctgtaggtgtaaacttttttgctgccaaacttatcaagcagccagccgccggggatttgcatcagcaagtaggcccagccaaaagcggagaagatgtaacccatgctaaccgcacttaactgcaactcttttgccacttcggtaccagcaatagacagcgttgcacgatcggcgtagttaacggcggtaacaataaaaataatcagtaatattaaatagcgggtatgcacgcctttctttttttcgtcaacggtgtccagaatcattttatttacctcgggtacttatgctgatttttattattatggggaaggtgttatttatgagtttcatttatgccgtaacgacaatgaactcgggaattagtataagcagcgcgagaataataatcattgtgcaaatgctaatttaattaatactatttaaatattattttgagcatatgcacataaggttgcgcgctaaagcacagatttgcgctttaccttaccgggcggcactgcaatccctgaaatgattgacattgatcacatttctgcgtttaaactcctgacattcttatttcacccaatgaagtcatttatttttaaatgagaccaggtcctcattttaataacccctggctggagaatattgcacaatggccaacatcgaaatcagacaagaaacgccaactgcgttttatataaaagttcacgacacagataatgtggcaattattgttaatgataatggcctgaaagcaggaacgcgttttccggatgggctggaattaattgaacatattccccaggggcataaagtcgcattgctggacattccggctaatggtgaaattattcgttatggcgaagtgattggttacgccgtgcgtgcaatcccacgcggaagctggatcgacgaaagcatggttgtactaccggaagcgccgccgttacacacgctgccactggcaaccaaagtcccggaacccttaccgccgctggaaggatacacctttgagggctatcgcaatgccgatggcagcgtgggcaccaaaaacctgctcggtatcaccaccagcgtccactgtgtggcaggcgtggtggactatgtagtaaaaatcattgaacgcgatctgctaccgaaatacccgaacgtcgatggcgtggtggggctgaatcatttgtacggttgtggcgtggcgattaacgcaccggcggcagttgtacctatccgtaccattcacaatattagcctgaatcctaactttggcggcgaagtaatggtgattggcctgggttgtgaaaagttgcagcctgagcgcctgctgactggaacggatgatgtgcaagctattccagtagaaagcgccagcattgtcagtttgcaggatgaaaagcatgtcggttttcagtccatggtcgaggatattttgcagatcgccgaacgccatctacaaaaactgaatcaacggcagcgagaaacctgcccggctagtgaactggtcgttggtatgcagtgcggtggcagcgatgcgttttctggtgtaacggcaaacccggcggttggctatgcgtctgatctactggtgcgctgcggcgcaacggtgatgtttagtgaagtaacggaagtgcgtgacgcgatccatctgctgacaccacgcgcagtgaacgaagaggtcggcaaacggctgctggaggagatggagtggtacgataactatctcaatatgggaaaaaccgaccgcagcgccaaccctagcccgggcaacaagaaaggcggtctggcaaacgtggtagagaaggcactcggctccattgctaaaagcggtaaaagcgcaattgttgaagtgctgagccccggtcaacgcccgactaaacgcggattaatttacgccgcgacgccagccagcgattttgtctgtggcacgcaacaggtggctagcggtatcacagtgcaagtgtttacgaccggtcgtggtacgccgtacggcctgatggcggtacccgtcattaaaatggcaacccgcaccgagctggcgaaccgctggtttgatttaatggatattaatgcgggcaccatcgctaccggcgaagaaactattgaagaggtgggctggaagttgttccactttattctcgacgtcgccagcgggaagaagaaaaccttcagcgatcaatgggggctgcataaccagctggcggtgtttaacccggcaccggtgacctgatttcttttggaacgtccctcgcaaaacatggccttagtgccatgtttttattgtttaaagcccccacgtccattaataatgcatttgcattaccttagttcaagcttataatttgagcagaaaacaggctgtaaaaggacagtgaatcatgcccgctaatgctcgctctcacgctgtactgaccactgaaagtaaggtcacgatacgcggacaaacaactatccccgcgccagtgcgtgaggccttaaaactgaagccaggccaggacagcattcattacgaaattctgcctggtgggcaagtatttatgtgccgactgggagatgaacaggaggatcatactatgaatgcatttttgcgttttctggatgcagatatccagaacaacccgcaaaaaactcgtccattcaacattcaacaaggaaagaaacttgtcgctggcatggacgtcaacattgatgatgagattggcgacgacgaataatggattttccacaaagggttaatggttgggcgctatatgctcatccctgttttcaggaaacctacgacgctttagttgccgaagtcgagacattaaagggaaaagatcctgaaaattatcagagaaaagccgccacaaagttattggcggtagtccataaagtgattgaggagcatatcacggtcaatccaagtagtccggcattccgtcatggcaagagcttaggctctgggaaaaataaagactggagtcgggtaaaatttggtgctggtcgttatcgtctcttctttcgttatagtgaaaaagagaaagtcatcattctgggatggatgaacgatgaaaacactctgcgcacctacggtaaaaaaacagatgcctataccgtattcagcaaaatgttaaaaagaggacatcctcctgccgactgggaaaccctcacccgagaaacagaagaaacccattgatggtgttcacaatgcccgccgaacgcattcgtgttgaccagcgggcatcctttctcactccccgaccagaatcacttcaaccccagcctttcgcagtccttccaggctatccgcaggaatgccttcatcaacaatgatcatgtcgatacgttgagtatcaatgatcttatgtaaactggaacgattgaacttactggaatcggtgaccacgatgatccgttccgcaacttcgcacatccgacggtttaaacgagcttcatcttcattatgtgtgctgacgccgcgctccagatcgatcgcatctacaccaagaaacagcatatcgaagtggtaattttgcaggctttgctcagcctgatcgccgtaaaaagattggctctgacggcgcaaatgcccgccggtcatcagcagctcaacgccttccgcttccagcaacgcattagccacgttcataccgttggtcatcgcaattacgtcagtgtgcttgcgcatcagacgagcaatctcaaaagtggtggtcccggaatcgaggataacccgatgacctggctgaatcaactcaacggcagctttcgcaacgctgcgtttcatcgcggtgttcagtgcgcttttatcttccacacttggctcgacactcggcgtcgtgctatcgcagatcaacgcgccaccataggcacgcacagcgatcccctgcttttccagaaacgccagatcgttgcggatcgtcacagtagatacgccatacaatgcgctcagatcgttaacctgcacactcccttgctgtcgcagacgctgaatgatctgttctcgtcgctcgctggtgccagtcactcgcttctcaccactagcgtcggtattactcatagtaagtcctttcgtaaaactttcgtttcatttcgttttgcctattaacgcctttctattaagcaaatgcaagcccaccttgcccattgacgcaagctactctcgtttcagtgactttcattatgtttcttttgtgaatcagatcagaaaaccattatctttcgttttatttttatctcaccatgacgcagtatcaactgaaacaaaacgaaagattaatatcgcagtaatctgaactggagaggaaagtgaaacatctgacagaaatggtgagacagcacaaagcgggcaaaacaaatggaatttatgccgtttgttccgcacatccgctggtgctggaagctgcaatccgctacgccagtgcaaaccaaacgccgttactgattgaagcaacctccaatcaggtagaccagttcggcggttataccggaatgacgcccgccgattttcgcggctttgtttgtcagctcgccgacagcttgaatttcccgcaggatgcgttgattctgggtggtgaccatctggggccaaaccgctggcaaaacctgccggccgctcaggcaatggccaatgccgatgatttgattaaaagctacgttgcggcaggattcaaaaaaatccaccttgattgcagcatgtcctgtcaggacgatccgattcccttaactgatgacatcgtggctgaacgcgccgcccgtctggcgaaagtggcggaagaaacctgtcttgaacactttggcgaagccgatctggagtatgtcattggtaccgaagtgccggtacctggcggcgcgcatgaaaccttaagcgagctggcggtcaccacgccggatgccgcccgcgccacgctggaagcccatcgtcacgcctttgaaaagcaaggtttgaatgccatctggccacgcatcattgccctggtggttcaacccggcgtcgaattcgatcacaccaacgttattgattatcagcccgccaaagcgagcgccttaagccagatggtcgaaaactacgaaacgctgattttcgaagcgcactctaccgattatcaaacgccgcaaagcctgcgccagctggtgattgaccactttgccattctgaaagttggcccagcgctgaccttcgccctgcgtgaagctctgttctctctggcggcgattgaagaagaactggtgccagcgaaagcctgttctggtctgcgtcaggtgctggaagacgtgatgctcgaccgcccggaatactggcaaagccactaccacggtgacggcaacgcgcgtcgtctggcgcgtggttatagctacagcgatcgcgtgcgctattactggccggacagccagattgatgacgctttcgctcatctggtacgtaatctggcggatagtccaattccgctgccgctgatcagccagtatctgccgctgcagtacgtgaaagttcgctccggcgagctgcagccaacgccacgggaactcattatcaaccatattcaggacatcctggcgcagtaccacacagcctgtgaaggccaataagcaaaacaaagaggaacacgctatgccaaatattgttttaagccggattgatgaacgcttgattcacggtcaggtcggcgttcaatgggtcggatttgcgggggcaaatctggtgctggtagccaacgatgaggttgccgaagatccggtacaacaaaacctgatggaaatggtactggcagaagggatcgccgtacgtttctggacgctgcaaaaagttatcgacaacattcatcgcgccgccgatcgacagaaaatcctgctggtttgtaaaacacccgccgatttcctgacgctggtgaaaggtggcgttccggtgaatcgcattaacgttggcaatatgcactacgccaatggcaaacaacaaatcgccaaaacggtttctgtggatgcgggcgatatcgcagcatttaacgacctgaaaaccgctggggtggaatgcttcgttcagggcgtcccgacagagcctgctgtggacctctttaaattactttgagggattcatcatggaaatcagcctgttgcaggcatttgcgttgggcattatcgcctttatcgctggcctggatatgtttaacggcctaacccatatgcaccgcccggtggtcctcggcccgttggtcgggctggtacttggcgatctgcataccggaattttaaccggcggtacgctggaactggtgtggatggggctggccccgctggcgggcgcacagccgcctaacgtgattatcggtactatcgtcggcacggcgtttgccattactactggcgtgaaacccgatgtcgcagtaggtgtcgccgtacctttcgctgtcgcagtacagatggggattaccttcctgttcagcgtgatgtccggcgtgatgtctcgctgcgacctggcaacaaacccgcgccgcatttgatgctggtgccgacggcctggtgcattgctataacgggatgacaggtttacatcaccgcgaaccgggaatggttggcgcgggattaacggacaagcgcgcctggctggaactgatagccgatggtcatcatgtgcatccggcggcaatgagcctgtgttgttgctgtgcgaaagagagaatcgtactgatcaccgacgcgatgcaggcagctgggatgccggatggtcgctatacgttatgtggtgaagaagtgcagatgcacggtggcgttgtccgtaccgcgtctggtgggctggcgggcagtacgctgtctgttgatgcggcagtgcgcaatatggtcgagttgacgggcgtaacgcctgcggaagccatccatatggcgagcctgcatccggcgcgaatgctgggtgttgatggtgttctgggaagccttaaaccgggcaaacgcgccagcgtcgttgcgctggatagcgggctacatgtgcaacaaatctggattcagggtcaattagctagcttttgatagtttgctcctttattgggccttcacttcccccgtaaggcctttctttttctttcgttttgatctgtgcagcggtgtcggatgcgacgctaacgcgtcttatccgacctacagttggtgaccgcaaggccggataaagcgtttgcgccgcatccagcaatcccttttgcttcctttatcttttctttcaacgatcacaaatttcgttttatttcttttttctccattgaactttcagtttcttttctatagattttaatcaacgaaagacatcaccaagtgaaatgaaacgaaaggcaagtgaaagcgacaacgcccgacgtcaagttcatcagactaaggattgagttatgccagaaaattacacccctgctgccgccgcaaccggtacatggactgaagaagagatccgccatcagcctcgcgcatggatccgtagtctcaccaacatcgacgcgctacgttccgcgctcaataacttccttgaaccgttactgcgcaaagagaatctgcggatcatcctgaccggagccggaacgagcgcatttatcggtgacatcatcgcgccgtggctcgccagccataccggtaaaaacttcagcgccgtaccgaccaccgatctggtcaccaatccgatggactacctgaacccagctcatccgctgctgttgatctccttcggtcgatccggcaacagcccggaaagcgtcgcagccgtggaactggcaaatcaatttgtaccggaatgctatcacctgccgatcacctgcaacgaagcgggcgctctttaccaaaacgcgatcaacagcgataacgcgtttgccctgctgatgcccgcagaaacgcacgatcgcggctttgcgatgaccagcagcattaccaccatgatggccagctgcctcgcggttttcgcacctgagacgatcaacagccaaaccttccgcgacgtggcggatcgttgccaggcgatcctgaccagtctgggcgatttcagcgaaggtgtgtttggttacgcaccgtggaaacggatcgtttatctcggtagcggtggcttacagggcgcagcacgcgagagcgcgctgaaagtgctggaactgacggcgggtaaactggcggccttttatgattctccaaccggattccgtcatggaccaaaaagcctggtcgatgacgaaacgctggtggtggtatttgtctccagccacccttacacccgtcagtatgatcttgatctgctggctgaacttcgccgtgacaaccaggcaatgcgtgtaatcgccatcgccgcggaaagcagcgacatcgtcgctgccggtccacatatcatcctgccaccgagtcgtcactttatcgacgttgagcaggcattttgcttcctgatgtacgcccagacgtttgcactgatgcagagcctgcacatgggcaatacgccggataccccaagtgccagtggcaccgttaaccgcgtggtgcaaggcgtaatcattcatccgtggcaggcataagaggatcgcattatgagcattatctccactaaatatctgttacaggacgcccaggccaatggctacgcggtgcctgcttttaacattcataacgccgagacgatccaagcgatcctcgaagtgtgcagtgaaatgcgaagcccggtgatcctcgccggaacgccggggacctttaaacacatcgcgctggaagagatctacgccctgtgtagcgcctattccacaacctacaacatgccactggcgctgcatctcgaccaccacgaaagcctggatgatattcgccgtaaagtccacgcaggtgtgcgcagtgcgatgatcgacggcagccacttcccgtttgccgagaacgtgaagctggtgaaaagcgttgttgacttctgccacagtcaagattgcagcgtggaagcagaactgggccgcctgggcggtgttgaagatgacatgagcgttgacgccgaaagtgcattcctgaccgatccacaagaagctaaacgctttgtcgaactgactggcgtcgacagcctggcggtagcgattggtacggcgcacggcttatacagcaaaacgccgaagattgatttccagcggctggcggaaattcgtgaagtggtggatgttcctctggtgctgcatggtgccagcgatgttccggatgaatttgtccgtcgcactattgaacttggcgtcacaaaagtgaacgttgccacagaattaaaaatagccttcgctggcgcggttaaagcctggtttgcggaaaatccgcagggtaacgatcctcgttattatatgcgcgtcggaatggatgcgatgaaagaagttgtcagaaataaaattaatgtctgtggtagtgcgaatcgaattagtgcataatcattagttttttatgatttatcccaatgtacttcccgattaatatcggggagtgccttaatggaaaaggagataactaaaccttaataaatacatcactacaatatcgcaacaataatatatttaaaaaaattatattattcaactttatggtgaggattacacaatgaccagtccaaatattctcttaacccgtattgataaccgtctggttcacggtcaggttggcgtgacctggacatccaccatcggtgcaaatctgctggtagtcgtggatgatgttgtcgctaacgatgatattcaacagaaattaatgggtattaccgcggaaacctacggctttggcattcgtttctttactatcgaaaaaaccattaacgtcatcggcaaagctgcaccacatcagaagatcttcctgatttgccgtacgccacaaacggtacgtaaattggtagaaggtggtattgacctgaaagatgtcaacgtcggcaatatgcatttcagcgaagggaaaaagcaaatcagcagtaaagtttatgtcgatgaccaggatctcacggacttacgttttattaaacaacgtggcgtgaatgttttcattcaggacgtccctggcgatcaaaaagaacaaatccctgactaaatctaaaatcgccttaatattggtttgaggtaataaaaatgcatgaaataaccctacttcagggattatccctggcggcgttagtttttgttctggggattgatttttggctggaagccttatttttattccgcccgataatcgtttgtaccctaactggcgctattctcggtgatattcagactggcttaattaccggtggtctgacagagttggctttcgccggattaacccctgcaggtggtgttcagccgcccaacccgattatggcgggtctgatgaccaccgtcattgcatggtctacgggcgttgatgccaaaacagcaattggtcttggcctgccgtttagtttgttaatgcagtacgtcattctgttcttctattccgctttcagtttatttatgaccaaagccgataaatgcgcgaaagaggcggatacggcagcgttttcccggcttaactggacaacgatgctcatcgtcgctagtgcgtatgcggtgattgctttcctctgtacttacctggcacagggggcgatgcaggcgctggtgaaagcgatgcccgcctggctgacccacggctttgaagtggctggcggtattctgcctgccgttggttttggcttgctgctgcgcgtaatgttcaaagcgcaatatatcccttacctgatcgccggtttcctgtttgtttgctacatccaggtcagcaacctgttgccggttgccgtactgggcgcaggctttgcggtgtatgagtttttcaatgcgaaatcccggcagcaagcgcaaccgcagcccgttgccagtaaaaatgaagaagaggactacagcaatgggatctgaaatcagtaaaaaagatatcacccgtctgggctttcgtagcagcctgctgcaagcgagctttaactacgaaaggatgcaggcgggcggttttacctgggcgatgttgccgatcctgaaaaagatttataaggacgacaaaccgggcttaagcgcggcgatgaaagataacctcgaatttattaatacccacccgaatctggtcggattcctgatggggttattaattagcatggaagaaaaaggagaaaaccgcgacaccattaaaggcctcaaagtggcactgtttggcccaatcgccgggattggcgatgcgattttctggtttactttgttgccgattatggcgggaatttgcagtagttttgccagccagggaaacctgctggggccgattctatttttcgccgtttacctgcttatctttttcctgcgcgtcggctggacccacgtcggttatagtgtcggcgtgaaggcgatcgataaagtgcgagagaacagccagatgattgcccgtagcgcaaccatcctcgggatcacggtaatcggcgggctgatcgctagctatgtgcatattaacgtggtgacaagctttgccatcgacaatacccacagcgttgcgctgcagcaggatttcttcgataaagtcttcccgaacattttaccgatggcctacaccctgctgatgtattacttcctgcgggtgaaaaaagcgcatccggtgctgttaatcggcgtgacttttgtgctctctattgtttgttccgcattcggcattttgtaaatggaacgaggcactgcgtctggtggtgcctctttacttaaggaatttcatcctgtgcaaacccttcagcaagttgaaaactatacggcgttaagtgaacgtgccagcgaatatttattggccgtgatccgtagcaaaccgaatgccgtgatttgcctggcgaccggagccacgccattactgacgtatcattatctggtagaaaaaatccaccagcagcaggttgatgtcagccagctcaccttcgtgaagctcgacgaatgggtggatctgccattaacgatgccaggcacctgcgaaactttcctgcaacagcatatcgtgcagccgctggggctacgtgaagaccagctcatcagctttcgctccgaagagataaatgagacagagtgcgaacgggtaacgaacctgattgcgcgcaaaggcggtctggatttatgcgttctcggattggggaaaaacggtcatcttgggctgaacgaaccgggagaaagcctgcaaccggcctgccatatcagtcaacttgatgccagaacacagcaacatgagatgttaaaaaccgcgggtcgccccgtgactcgtgggatcaccttaggcctgaaggatattctcaatgcccgcgaagttttgttactggtgactggcgaaggaaagcaggatgcgacagatcgttttctcacggctaaagtctctaccgctatcccggctagttttttatggctgcacagtaactttatttgtttaattaacacctaaccagatgaaaaatttgctcaaaatgtttaaattaacttatgtaacagtcacgcattatattaaataacatttgactgggttgaacataacgccgatagcaaaaggagttatgttcaacaatttaattttagatatacatataacttgttctattaataaatcacctcgtattctgactcgccccctggcgcagcaaagtcaggcatttatactcttttgaatacatagaaaattgatatcaatataatgaaaatatcaaatatttgcatataaatataatcttaaagttcagtctatttaatgttcaatgaaatatttctgcctgtataatctttaaagatgttgaacatatattcacattaaatatgattatgtacttgttacaaggataaggttatatatgaataaagttacaaaaacagctattgcgggcttacttgcgcttttcgcaggtaatgccgctgcaaccgatggtgaaatagtttttgatggcgagattttaaaatccgcttgtgaaatcaatgactctgataagaaaattgaagttgctcttggtcactataatgccgaacagtttcgtaatattggcgagcgtagcccaaaaattccattcactattcctttagttaactgcccaatgactgggtgggagcacgataacggcaacgttgaagcgtctttccgtctatggctggaaacgcgagataatggcaccgtccctaacttccctaatctggcaaaagtaggctcttttgctggcatagcggcaacaggtgtgggtatccgtattgacgatgcggaaagcggaaacattatgccactgaatgctatgggcaatgataacacggtttatcagatcccggcggaatccaatggtattgtcaatgttgacctcatcgcttactacgtaagtaccgtagttccaagtgaaatcaccccaggggaagcagacgctatcgttaacgtaacgctggattaccgttaatacgttagggcgttatctgacctgtcagataacgcccttttccttcctctttctcgttgtatcaggttgaaaaataactatgagtaaacgaacattcgcggtgatattaaccttgttgtgtagcttctgtattggccaggcgcttgcaggaggaatcgttttacagcgaacgcgagtgatctatgatgccagccgcaaagaggctgcgttacctgtcgcaaacaaaggcgcagaaacgccttatttactgcaaagttgggtagataatatagatggtaaaagccgtgccccatttattataaccccaccgctatttcgtcttgaggctggcgatgacagtagtctgcgaattattaaaacagctgataacctgcctgaaaataaagagagcctgttctacattaatgttcgtgccattccagcaaagaaaaaaagtgatgatgttaatgctaacgagttgacgctggtatttaaaacacggatcaaaatgttttatcgccccgcacacctgaagggacgggtaaacgatgcgtggaaaagtctggaatttaaacgtagtgaccatagtctcaatatatataacccaactgaatattacgtcgtatttgccggactggcagtcgataaaaccgatctcacaagcaaaattgaatatatcgcgcccggagaacataaacagttaccacttcctgcatctggcggaaagaacgtgaaatgggctgcgatcaatgattatggcggcagttccgggacagaaactcgtccactgcaataaaaaatataaaaacacaggtcatcagggaatgccacaacgacaccaccagggacataaacgcacaccgaaacagttggcgctcatcatcaaacgttgtttgccgatggtgctcactggcagcggcatgctttgcactaccgctaacgccgaagagtattatttcgaccccattatgctggaaaccacaaaaagtggtatgcaaacaaccgatctgagccgttttagtaaaaaatatgcacaactaccaggaacttatcaggttgatatctggctgaataaaaagaaggttagtcagaaaaaaattacatttaccgccaatgcagagcaacttctgcagccacagtttacggtagaacaactacgtgagctgggtattaaggtggatgaaatcccggcgctggctgaaaaagatgacgatagcgtgatcaacagccttgaacaaatcattcccggtacagctgctgaatttgatttcaatcatcagcaacttaatttgagcattccccaaattgcactgtaccgtgatgcaagaggttacgtctccccttctcgttgggacgatggtataccaacgctgtttaccaactacagctttacaggttctgataaccgttaccgccagggcaatcgtagccaacgacagtacctgaatatgcaaaatggtgctaattttggcccctggcgattacgcaactattccacatggacacgcaacgatcagacaagtagctggaataccatcagtagttatttacaacgtgatatcaaggcgttgaagtctcagttgcttctgggagaaagcgccaccagcggcagtattttttccagctacacctttactggcgtgcaactcgcttccgacgataatatgttgccaaacagccagcgcggatttgccccaacggtacgcggtatcgcaaacagtagtgcaatcgtgactatcaggcaaaatggttatgtgatctatcaaagcaacgtgagtgcgggtgcctttgaaattaacgatctctacccctcttccaacagcggcgatttagaagtcacgattgaagaaagtgacggtacacaacgtcgctttatccagccttattctagtttacccatgatgcagcgacctgggcatctaaagtatagcgcgaccgctggacgctatcgcgctgatgcaaacagtgatagcaaggaacccgaatttgctgaagccacggcaatatatggtttgaataatacttttacgctgtatggcggcctgctcggttctgaagattattatgcgctggggatcggtatcggcggcacacttggcgcactgggcgcgttgagcatggatatcaacagagctgacacccaattcgataaccagcactcttttcatggctatcaatggcgtacgcagtacatcaaagatatcccggaaaccaacaccaatatcgctgtcagctactatcgctataccaacgatggctattttagttttaatgaagccaatacccgcaattgggactataacagtcgccaaaaaagtgaaattcaattcaacatcagccagacaatatttgatggggtaagtctgtatgcctccggtagccagcaagactattggggcaataacgataaaaacaggaatatctctgttggggtttccggccagcaatggggagttggttacagcctgaattatcaatacagccgctacactgatcaaaataatgaccgcgcactctctttgaatctcagtattccgttagaacgctggttaccgcgtagccgggtttcctatcagatgaccagccagaaagatcgcccaacccaacatgaaatgcgtcttgatggcagtctgctggatgatggtcgcctgagctatagcctggaacaaagtctggatgacgataacaaccataacagtagcctgaacgccagttaccgtagtccttatggcaccttcagtgccggatacagctacggtaatgacagcagccaatacaattacggcgttaccggcggcgtggttatccatcctcatggcgtgacgctcagccaatatctgggcaacgcttttgcgcttatcgatgctaacggagcatctggcgtgaggatacaaaactatccggggattgctaccgatccttttggctatgcagtggttccttatctcacaacttatcaggaaaaccgtctcagcgtagatactacgcagctgcccgataacgtcgatcttgaacaaacaacacagtttgtggtgcccaacagaggtgcaatggtagcggcgcgtttcaacgccaatatcggttatcgcgtacttgttacagtcagcgatcgcaacggtaaaccgttgccctttggcgctcttgccagcaacgatgatacggggcaacaaagtatcgtcgatgagggcggcatactatatctctctgggataagcagtaaaagtcaaagctggactgtacgctggggaaatcaggcagatcaacaatgtcagtttgctttcagtacaccggatagtgaacctacaacctctgtattacaaggcacagcgcagtgccattaaggataaaaaaatgaaaagagcgcctcttataacaggtcttttgttgatatccacatcctgcgcttatgcctccagtggagggtgtggagccgacagcactagcggtgcgacaaattacagcagtgtggttgatgatgttacggtgaaccagacagataacgtgacaggacgggagtttacctctgcaacgctaagtagcactaactggcaatacgcctgttcctgctctgcgggtaaggcagttaaacttgtctatatggtcagccccgtacttaccaccactggacatcagacaggatattacaaactcaatgacagcctggatattaaaaccacattacaggcaaacgacattccaggactcacaaccgaccaggttgtctctgttaacacccgattcacacagataaaaaacaacacggtatattctgctgcaacccaaacgggtgtttgccagggtgatacgtctcgttatggacccgttaatattggtgcgaacaccacctttaccctgtatgtcaccaagccatttctcggcagcatgaccattccgaaaacggatattgccgtcattaaaggcgcgtgggtcgatggaatgggaagcccgtctacaggtgacttccatgatttagtcaagttaagcattcagggaaatctcaccgccccacagagctgcaaaattaatcagggcgatgttattaaggttaattttggattcatcaatggtcagaagtttaccacccgcaatgccatgccagacggttttactccagtagactttgatatcacttatgactgtggtgatactagtaagattaaaaacagcttgcaaatgcgcatcgacggtacaactggggtagtagaccagtacaacctggtcgccaggcgaagaagtagtgacaatgtgcccgatgtcggtattcgtattgaaaatctcggcggcggagttgcaaatattccttttcagaacggtatccttcccgttaatccttccgggcatggcaccgtcaatatgcgcgcctggccagttaatctggtcggtggtgagctggaaacaggaaaatttcagggcacagccaccattaccgtcatcgtgcggtaaaagaagacgttgcgttttgattaacgcaacgcttcggcactgttacccctgctgctccagcgcatacttatacagcgcatttttcttcacgccgtgaatttctgcggccagcgccgccgcttttttcagcggcagttctgcctgtagcagcgccagcgtgcgcagggcatcggcgggtaagtcttcttcctgtgctttatgaccttcgacaatcagcaccatttcgcctttgcgacggttttcatcttcctttacccacgccagcagctcgccaacgggcgcgccgtgaatggtttcccaggttttggtcagctcacgcgccagaaccacgtagcgggattcgcctaataccgcaacgatatcttccaggctatctaacagacggtgggtagattcataaaaaatcagcgtgcgcggctccgcttcaatggcttttagcgcatcacggcggcctttacttttggcaggtaaaaagccttcgtaacagaaacggtcagagggtaaacccgctgcgcttaacgcagtgatagcagcacacggcccgggtagcggcaccacgcggatccccgcttcacggcaggtacgcaccagatggtagccaggatcgttaattagcggcgttccggcatcggaaaccagcgcaatgttttgcccctcttgcagcttcgccagcagcgtttcagctttttgttgttcgttatggtcgtgcagcgcaaacaaccgggcattaatcccaaaatgttgcagcaataaaccggtgtgacgagtatcctcggcggcaatcagatcaacggcctgtaatacctctaacgcacgctgggtgatatccgccagattgccgattggcgtcggtacaatgtaaagctggccctgagaattatccgcgctttggtgttgtttcattgtgtcgtccgtattgccgatttaatattgagcattgcgtaaaaaaaatatcactggatacattatggtacccagtacattttctcgtttgaaagccgcgcgttgtctgcctgttgttctggcagccctgattttcgccggttgtggcacccatactcccgatcagtccactgcttatatgcagggcacggcgcaggctgattctgccttttatcttcagcagatgcagcaaagctctgatgataccaggatcaactggcaattactcgccattcgtgcactggtgaaagaaggtaaaaccgggcaggcggttgagttgtttaaccaactaccgcaagaactgaacgatgctcagcgtcgcgagaaaacactgctggcggtagagattaaactggcgcagaaagattttgctggcgcgcaaaacttgctggcgaaaatcacacctgccgatttagaacaaaaccagcaagcgcgttactggcaggcaaaaatcgatgccagccaggggcgtccttccattgatttactgcgcgcgttaattgctcaggaaccgctgcttggcgcgaaagaaaaacagcagaatattgatgccacctggcaggcgctctcctccatgactcaggaacaggcgaatacgctggtgatcaacgccgacgaaaatattctgcaaggctggctggatctgcagcgcgtctggtttgataaccgtaacgatcccgacatgatgaaagccgggatcgccgactggcagaaacgttatccgaacaatccgggcgcgaaaatgctgccaacgcagttggttaacgtaaaagcgtttaaaccagccagcaccaacaaaatcgccctgctgttgccactgaatggccaggcagcggtatttggtcgcactattcagcaaggctttgaagcggcgaaaaatatcggcactcagccagtggcagctcaggtagctgccgcacctgccgcagacgtagctgaacaacctcagccgcaaaccgtggatggcgttgccagcccggcacaagccagcgttagcgatctgaccggtgaacagcctgcagcccagccggtgcctgtaagcgccccggcgacaagcaccgcagcggtaagcgcacccgcaaatccatccgcagagctgaaaatctacgataccagtagtcaaccacttagccagatcttaagccaggttcagcaggatggcgcgagtattgtggtcggtccgttgctgaaaaataacgttgaagagttgctgaagagcaacactccgctgaacgtactggcactgaaccagccggagaatatcgaaaatcgcgtcaatatttgttacttcgcgcttagtccggaagacgaagcgcgcgatgcagcgcgtcatattcgtgaccagggtaaacaagcgccgctggtgctgatcccacgcagtagtttgggcgatcgcgtagccaatgcgtttgcgcaagagtggcagaaactgggcggcggcaccgttctgcaacaaaaatttggttccaccagcgaattacgcgcgggtgttaacggcggttctggtattgctttaacgggtagcccgattactctcagagcgacaaccgactccggcatgacgaccaacaatccaacgctgcaaaccacgccaaccgatgaccagttcaccaataatggcggtcgtgtcgatgcggtgtacattgtggcaacgccgggtgaaatcgcttttatcaaaccgatgatcgccatgcgtaacggtagccagagcggtgcaacgctgtacgccagctcccgcagtgcgcaagggaccgctggcccggatttccgactggagatggaaggcttgcagtacagcgaaatcccgatgctggcaggcggtaatctaccgttaatgcagcaggcactcagcgcggtgaataacgattatagtctggctcgcatgtatgcgatgggcgtcgatgcctggagcctggcaaatcatttcagtcaaatgcgccaggttcagggttttgaaatcaacggtaataccggaagcctgacggctaacccggattgcgtgattaacaggaacttaagttggctacagtaccaacaaggtcaggtagtccccgtcagttaaattaagtgattaacaggaacttatcatggctacagtaccaacaaggagtggtagtccccgtcagttaaccaccaaacagaccggcgatgcgtgggaagcacaagcgcgtcgctggctggaaggcaaaggactgcggtttatcgccgctaacgtgaacgagcgtggcggcgagatcgatctgataatgcgtgaaggccggaccaccatttttgtcgaggtacgctatcgccgctctgcgctttatggcggcgcggcagccagtgtgacccgcagcaaacaacacaaattattacagactgcccgcttgtggctcgcgcgtcataatgggagttttgatactgtggattgccggttcgatgtggtagccttcaccgggaatgaggttgagtggattaaggatgcctttaatgaccacagttaattaaggtttaaggattagcgtgcaagaaagaattaaagcttgcttcactgaaagcattcaaactcaaattgcggcggcagaggcgcttccggatgccatctcccgtgcagccatgacgctggttcagtctctgctcaatggcaacaaaatcctctgttgtggtaatggaacttccgctgccaatgcacagcattttgctgccagcatgatcaaccgtttcgaaacggagcggcccagcttacctgccattgcactaaatactgataatgttgtcttaacggcgattgccaacgatcgcttacatgatgaagtgtatgcaaaacaggtgcgggcgctgggtcatgcgggagatgtattgttagccatttccacccgtggcaacagccgcgatattgttaaagcagttgaagccgccgttacgcgtgatatgaccattgtggcattgaccggctatgacggcggcgaacttgcaggtttgttagggccacaggatgtggagatccgcattcctagccatcgtagtgctcgcattcaggaaatgcatatgctgacggtaaattgcctgtgcgatctgatcgataacacgcttttccctcaccaggatgattaaggagaatacatgaaggcattaagcccaatcgcagtccttatttccgcgctgctgttgcaaggttgtgttgccgctgccgtagtgggtaccgctgctgtgggtaccaaagccgcaactgacccacgcagtgtcggcacccaggtggacgatggtaccctggaagtgcgcgtgaacagcgcattgagcaaagacgaacagattaagaaagaagcgcgcattaatgtaacggcctatcagggcaaagtgctgctggttgggcagagtccaaatgctgaacttagcgctcgcgccaaacagattgctatgggcgtagacggtgccaacgaagtgtataacgagattcgtcagggccagccgattggtctgggcgaagcatctaacgatacgtggatcaccaccaaagtgcgtagccagctcttaaccagcgacctggtgaaaagctccaacgtgaaagtgaccaccgaaaacggtgaagtgttcctgatggggctggtgactgaacgtgaagcgaaagcggcggcagatattgccagccgggtgagcggcgtgaagcgggtaactacggcgtttacgtttattaaataacagccccttgtaatgcctgatgcgacgcttgccgcgtcttatcaggcctacaacgatacaaaccgtaggtcagataaggcgtttacgccgcatccgacatgttttccctcaaatcagaacaacagcgccagcccgccgacaatcacaccagacactgccaccatcgcccctgtcagccataaggctttcgccgggaacgctttgcgcagcataatcagactcggcaaactcactgccgggagcgtcatcaacaatgccagcgccggagcggttcccatacctgccagcatcatcgtttgtacaatcggaatttctgctgccgtgggaatgacaaacaagcatcctgctaccgccatcgccaccacccacatcaggctgttatcgacagcaccatcggcatgggggaataaccagacgcgagcggcacccaacaccagtactgcaaggatgtaaaccgggatcgtactccagaaaagcgtccatagcgccctgccccagcggctaaaaaacccgccctgtgcttccggtatgtcaatttcgaccggtgcctgcgtttgcggtgtttcacgcacccatttttgcaccagcgtcgcaatcagcaacaccatcaccagcccggccaccagacgaatcgccgcaaaaccccagccgaggacaaagcccataaacaccagcgtcgccgggtttaacaccggattgcccatccagaatgccagcgcaccgcccatgctcacctgttggcgacgcattcccgccgcgaccggagccgcacagcaggtacacatcatgcccggcaagctaaacagcgttcccagcagcgtgccgcgaaagcggctttgcccaagcgtacgcaacaaccagtcacgcgggatcagcacctgaatcaagctaccgaggatcacccccagcaccgccgctttccataccgcgaggaaatagatcatcgcgtaatccaacgccgcctgccatgggttagcatccgcctgcgcaaggatagatttaccgatactgtgggtttcggcagcagtaaacgctttgccgtagtaaggttcccatttcacataccagagaccggcaatgacaacgagaaagaaaagcgcgggtttccaccactgaatgggcgttgccgcctgagaactagactgaccagtcatagcattccccaggaataagttatgataattgagcgcgtgaatattacgctcactatcaattcttgggaataattattcagctcttttgcgtaattcactagagcttaaaatcgtcacgccttcatgctcaggccgcatgctctctgccagcatgacccgcgccacgtctctcgcatcaatggatttccagttacctggtaacaaacggaacagcggcgcaaaaagcgtttcgttcatccgctgtttgctacgatcgcccagtaacatgctcgggcgagcaatggtcaatttcggccagttctgggcgattaatgcttcttccatctcccctttgacgcggttatagaaaaacgggctgtgggcattggcacccatcgcactgactaccaacatatgctgcgcgcccagtcgccgcccggttaatgcggtatccactaccagcgtgtaatcggcatgaataaacgcctctttgctccccgcttctcgccgcgtggtgccgagacaacaaaacacaatgtcgatgggatcggtgacctgcgccaacgcgtcactcagttgcggatcatggggattaaacaccccgggcatatcgcccaacggacgtcgcgtcggcgcagcaatggcgttaactttcggttcgttaatcaacatccgcagcaggtgaccgcccaccagccccgttgcgcctgtaatcagtacctgactcatcttcgctcctttacagaattgtctgccttgcgctccacggctcatgcaccaggcttaatagaccatgaggtaattatccccgattgtgggaaattcgcctcatccaatgcaacaacgcggaggaagcatgagtaagaaaattgccgttttaatcactgatgaatttgaggatagtgaatttactagtcccgcagacgagttccgtaaagccggacacgaagtgattaccattgaaaaacaagcgggtaaaacggtgaaaggcaaaaaaggagaagccagcgtgaccatcgataaatccatcgatgaagtgacgcctgcggagtttgatgccctgctgctaccgggcggccatagtccggattatctgcgtggggacaaccgttttgtcacctttacccgtgattttgtgaatagtggcaaaccggtgtttgccatctgtcacggcccgcagttgctgatcagcgccgatgtgattcgggggcgcaaactgaccgcagttaaaccgatcattattgatgttaaaaatgcgggcgcggaattttacgatcaggaagtcgtggttgataaagatcagctggttaccagccggacaccggacgatctgccagcgtttaaccgcgaggcgttacgcctgctcggtgcctgattacgcctgctcggtgccactgtcgcgtagccaaatcatttttttaccaaagcccagcgtgttgtcggtgaatttgatttcatcgagccggatttcccacaccggggcgctcagcattctggcaaccggaaagcgacgattgtacgccttgcgcgcgaggtcgctttcctcaccttccagcctgcggatctcacctttaaactgcacaccgcgaattaacgctaccgttttcggctgaccgtttaccgttccggcaaccgcagcctgcggcccactcatctgcgcgtggcgcgttttttcttccgtcaaaatgtagaaggcgactttctgcgcatcaaaaagataaaaggcattagcgcaccagagttccccttcctgctgcacacaccaagtgacaacatgttgttttgccagccaacggctgatggcgatgagtgtttccattgctgttctcttttatactgtgggcctgaccttaacatgcgacgcagacgatgacaccctggtttctttacttgatccgtaccgccgacaataagctttataccgggatcaccacggatgtcgaacgccgctatcagcagcaccaaagcggcaaaggggcgaaagcactgcgcgggaaaggagaactaacgctggtgttttccgcgccagtgggcgatcgtagcctggcgttacgggcggaatatcgcgttaagcaactgaccaaacggcaaaaagagcgtctggtagcggaaggcgcagggtttgcagagctgttaagcagtctgcaaaccccggagattaaaagcgattgaaatgctcgtgatactcaaccaggccggtaacgccattcagcgcgtcatccgctaaacgatgtacctggaaggcgctttcagtgcccggccagcggcaacgcagatcgtgatgcgccgccagttcaaagccgaaacgactgtacagcgccggatcgcccagcgtcaccactgcggcatagccgaactcattaaggctatcgagtccttcatagaccagttggcgtgccagcccctgtccacggtatttttcatcaaccgccaacggtgccatgccgacccattgcaggtcttcgccctgcacatcaaccggactaaatgccacatagccaatgacctgaccttcgtcatctgtcgccaccagccccagcgtcagaaagccatcttcacgcagatcgtgaaccagcttcgcttccgcatcactttcgaaactgcgacgcagcagggcatcaatacccggcgcatcaatgggaatttctactcgaattagcatggttcacctacgcttgtctgtttggtttcaggcgcggttttcattcccgcctcaacaaaatccgccagttgcagcagcatcatgcgtaaggctttcggcatttgctccagttcaatggcgtccatcaggtttttcacatacagccccagctccgtatcgccttcaatcaccagccgacgctggaagaagagcgtatccggatcttgtttacgcgccgcaatcatcagcagatcgctggcgtcggcactaaaactcacatcagcttgcgcgttctggctaacgaccagtttgccattcaccacgctggtaaaccattgcaggtcaatatcacgcacatgaatacttaaccagcggccttcaagaaactccagctcgccatcatccagcgcctggcggaattgccagcttaagacctgctcaagaacctggcgttttagcgcaaatggcgtcagttttaccggtacactcaacagagatggccccaaatgcacaatacgggaacgcagtttatccaacacgagttttactccctgtttcaacaatcatcctattttgccatatcagaaaaataacatagcggtataaatcaacaattccatatgaaattgctgctaccaccaatacaactttaactgccttaaatcaaaaattgtcgcagcaaggttaactaaaatcccagttcgttaacatttttgcgttttgatagcgcaaccttcaggaaaaattatggagctgctctgccctgccggaaatctcccggcgcttaaggcggccatcgaaaacggcgcagatgctgtttatatcgggctaaaagatgataccaatgcccgtcacttcgccggccttaactttaccgagaaaaaattgcaggaagcggtgagttttgtccatcaacatcgccgcaaacttcacatcgcgattaacacttttgcgcatccggacggttacgcccgttggcagcgcgccgtggatatggcggcgcagctgggtgccgacgcgctgatcctcgccgacctcgccatgctggagtacgccgccgagcgttatccgcatattgagcgccacgtaagcgtgcaggctagcgcgaccaatgaagaggcgattaacttttatcatcgccattttgacgttgctcgcgtggtgctgccgcgcgtgttgagcattcatcaggtgaaacaactggcacgggtcacacctgtaccactggaagtctttgctttcggcagcctgtgcattatgagcgaaggtcgttgctatctgagcagctatctgacgggtgagagccccaacaccataggcgcgtgttctccggcccgtttcgtgcgctggcaacaaacgccgcaggggctggaatcccgcctgaacgaagtgctgatcgaccgttatcaggacggcgaaaacgcaggttatccgacgctatgtaaagggcgttatctggtggacggcgagcgctatcacgcgctggaagaaccaaccagtctcaataccctggaactgctgccggagttaatggcggcgaatattgctagcgtgaaaattgaaggccgccagcgtagcccggcgtatgtcagccaggtggcgaaagtctggcgtcaggctatcgaccgttgtaaggccgatccgcaaaactttgtaccgcaaagcgcgtggatggagacgctcgggagcatgtccgaaggcacgcaaaccactcttggcgcatatcaccgtaaatggcagtgagaaaagcaatgaaatattccttagggccagtgctgtggtactggccaaaagagacgctggaagaattttatcagcaggccgccaccagcagcgccgacgtgatttatcttggtgaagcggtatgcagcaagcgtcgggcaaccaaagttggcgactggctggagatggcaaaaagcctcgccgggagtggtaagcagattgtgctctccacgctggcgctggtgcaggcaagttctgaactgggcgaactgaaacgctatgttgagaacggtgagtttctgattgaagccagcgatctcggcgtggtgaatatgtgcgctgaacgcaaactgccgttcgtcgccgggcacgcgctgaactgctacaacgcggtgacactgaaaatattgctcaaacagggcatgatgcgctggtgtatgccagtggagctttcccgcgactggctggtgaatctgcttaatcagtgcgatgagctgggcattcgtaaccagtttgaagtggaagtcctgagctacggtcatctgccgctggcctactccgcccgctgctttaccgcgcgtagcgaagaccgcccgaaagatgagtgtgaaacctgctgcattaagtatccgaacgggcgcaacgtgctgagccaggaaaaccaacaagtgtttgtactcaatggcattcagaccatgagcggctacgtttacaacctcggtaacgagctggcatccatgcagggcctggttgatgtggtccgcctgagtccgcagggtactgacactttcgcgatgctcgacgccttccgcgctaatgaaaatggcgctgcaccactgccgttgacggcgaacagcgactgtaacggctactggcggcggctggcaggactggagctgcaagcctaagtaaatagctcactttgttaacaactttaactactctttaatgcagtattaaagattaatcggtaacaaagtgagctgttatgactgataaaaccattgcgtttagcctactcgatctggcccccattcccgaaggttctagtgcgcgagaagcattctcccactctctcgatctcgcccgtctggctgaaaagcgcggctatcatcgctactggctggcagaacaccacaatatgactggcattgccagtgctgccacgagcgtattgatcggctatctggcggcgaataccaccacgctgcatctggggtctggcggcgtgatgttgcctaaccacagtccgttggtcattgcagaacagttcggcacgcttaatacactctatccggggcgaatcgatttggggctgggtcgtgctccgggtagtgaccaacggacaatgatggcgctacgtcgtcatatgagcggcgatattgataatttcctccgcgatgtggcggagctggtggactggtttgacgcccgcgatcccaatccgcatgtgcgcccggtaccaggctatggcgagaaaatccccgtgtggttgttaggctccagcctttacagcgcgcaactggcggcgcagcttggtctgccgtttgcgtttgccagtcacttcgcgccggatatgctgttccaggcgctgcatctttatcgcagcaacttcaaaccgagtgcacggctggaaaaaccatacgcgatggtgtgcatcaatattatcgccgccgacagcaaccgcgacgctgaatttctgtttaccagtatgcagcaagcctttgtgaagctgcgccgtggcgaaaccgggcaactgccgccgccgattcaaaatatggatcagttctggagtccgtctgagcagtatggcgtgcagcaggcgctgagtatgagcttggtaggtgataaagcgaaagtgcgtcatggcttgcagagcatcctgcgcgaaaccgacgccgatgagattatggtcaacgggcagattttcgaccaccaggcgcggctgcatagctttgagctggcgatggatgttaaggaagagttgttgggataatgtgtcttaacgcgggaagccttatccgagctggcaacgctgtcctacatagacctgataagcgaagcgcatcaggcattgtgtaggcagcagaaatgtcggataaggcaccgctgattactgatacaccggcagtaaattaaagctgcttaaaatatgcaccagtgcgttgccgacgccaaacaccagaatcagcgcaatcatcggcttgccaccccagacgcggaatttcgggctgccaaagcgtttacggcttgcacgggctaacagcgccggaacaattgccgcccagatggtagccgctaaaccagcataaccaatggcgtacaggaatccgttcgggaacaacagcccccccacaactggcggggcaaaggtcagcaatgccgttttcaagcggcccacagcgctgtcgtcgaaaccaaacagatctgccagatagtcaaacaaacccagcgttacgccgaggaagctactcgctaccgcaaagttactgaacacgaccagcagcagatccagactacggctgttcagtacgccgcttaacgcctgtaccagcacatcaatattaccgcccttctctgcaataccgataaactccggacgcgggatgttacccatcgtcgccagcaaccagatggtatacagcgccagcgccatcagcgtaccgtacaccagatatttcacgatggttttcggatctttgccgtaatacttcatcaggcttggcacgttaccgtgataaccaaagcttgccagacagaacggcagggtcatcaacagatacggtgcataagacgcattgctttcggcgacgttgaacaatgtcgcaggctgcacatgccccagcaggctaccaaaggtgaggaagaaggtaatgactttcgcccccagcacaatcgctgtcatgcgactgacggctttagtgctcaaccacaccacaaacgctaccagcaatgcaaaaccaaaacccgccgcccgtgccgggacgtttagactcatctctgcgaaggtgtgatgcagaatgctaccactggcagaaatataggcataggtcaggatatagagcacaaaggcaatggaaatgccgttgaccacgttccagcctttgcccagcaaatctttggtgatggtgtcaaaactgctaccgattctgtaattcaggttagcttccagaatcatcaagccggaatgcagcatacagaaccaggtaaagatcagcgccgccatactccagaaaaaccacgccccggacatgaccactggcagagaaaacatccctgcgccaataatggtgccgccgataatcaccacgccgccaagcaggctcggactcgtttgggtggtggttagtgttgccatgagggcttctctccagtgaaaaatagtgcgactgcgttgttatgcattgcactgtaccagtacacgagtacaaaagacagaaaaaaagccccgatggtaaaaatcggggctgtatatattattttacagattgtgttcgctgttcagcgatgattacgcatcaccaccgaaacgacgacgaccggtagaatcatcacgacgcggagcgcggccttcacgacgttcgccgctaaaacgacgaccatcaccacggccaccttcacggcgttcaccgctgaagttacgaccgccttcacgacgttcgccaccgaaaccacgaccaccgccacgacgctcaccgccagtatgcggctgtgcatcgcccagtaactgcatgttcatcggcttgttgagaatgcgagtgcgcgtaaagtgttgcagcacttcacccggcatacctttcggcagttcgatggtggagtgagaagcaaacagcttgatgttaccaatgtaacggctgctgatgtcgccttcgttagcaatcgcaccaacgatatgacgaacttcaacaccatcatcgcggcccacttcaatgcggtacagctgcatatcgccaacatcacgacgttcacgacgcggacgatcttcacggtcaccacgcgggccacggtcgttacgatcgcgcggaccacggtcatcacggtcacggaattcacgtttcggacgcatcggcgcatctggcggtacgatcagagtacgttcaccctgtgccattttcagcagtgccgcagccagagtttcgagatccagctcttcaccttcagcagtcggctgaattttgctcagcagtgcgcggtattgatccagatcgctgctttccagctgctgctgtactttagcggcgaatttttccagacggcgtttgcctagcagttctgcgttcggcagttctacttccggaatagtcagcttcatagtacgttcaatgttgcgcagcagacgacgctcgcggttctcaacgaacagcagcgcgcggccagcacgacccgcacgaccggtacgaccgatacggtgaacgtaagactcagaatccatcgggatatcgtagttaactaccaggctgatacgctcaacgtccaggccacgggctgcaacgtcggtcgcaatcaggatgtccagacgaccatctttcaggcgttccagtgtctgttcacgcagcgcctggttcatgtcaccgttcagcgcggcgctgttgtagccgttacgctcaagagcttcagccacttccagagtcgcgtttttggtacgaacgaagataatcgccgcatcaaaatcttccgcttccaggaaacgtaccagtgcttcgtttttgcgcataccccagacagtccagtagctctggctgatgtcaggacgggtagtcacgctggactgaatgcgcacttcctgcggctctttcataaagcggcgggtaatgcgacgaatcgcttccggcatggttgcagagaacagagcggtctgatgaccttccgggatctgcgccataatggtttcaacgtcttcgatgaagcccatgcgcagcatttcgtcagcttcatccagaaccagaccgctcagtttagagaggtccagagtgccacgtttcaggtggtccagcagacggcccggagtaccgacaacgatctgcggcccctgacgcagggcgcgtaattgcacgtcataacgctggccgccgtacagagcaaccacatttacgccgcgcatgtgtttagagaaatccgtcattgcttcagcaacctgtaccgccagttcgcgggtcggtgccagcaccagaatctgtggtgctttcagctcaggatcaagattctgcaacagaggtaaagagaatgctgcagtttttccgctccccgtctgggccatacccagaacgtcgcggccattcagcagatgtggaatacactctgcctgaattggagatggtttttcgtaacccagatcgttaagggcttcaaggataggagccttcaggcccagatctgcaaaagtggtttcgaattcagccatgtagtacgtgtgcctcaaaattaatggcggccagtctacataactcatcatgaaattgatcagcaattttcattgaaaagtgtgaaccggctcaaagtaggtgtattaacgaacaacaacgccctcacccgttaaggtgatggcaatcaaaaaagattacgggctgatgtgtacgtcagttattgctggtcgctttctgccaggtcatcttggtcctggcccaggaggcttaattccaacaatgcgtatcggtgctcaacaaagttatgaacgttgttggcaaccgccagtttgaacagtgccgtggcgctgtccaaatcccccagacttaggtagtacttacctaaatagaagttggtttcactgagatgctcagcgaggctggtgttatccgttgcgtccgccttgagcctttccattaacgtttgttcgctaatgttgcccaggtagaactcgacaatgttccatccccactgttccttatcgcttttttcgaagtgctgtttcaacacttctttagcctgcttctcatcgagcttctgctcggcgagataaagccacagactacggaaaggatcattgggatcgtcttgataaaacgccagcagatcatcttgcgctaacttgtcacgaccgccgtaatataatgcgatcccgcgattcaagtgcgcgtagttgtaagttggatcaagctcaagtacagaatcaaacgcttcataggcagcatcaaaattgcctgcctgcgttaaatatatgcctaagtaattgaatacttcaggcatatccggtcggattgccagcgcttggctaaaatcgttacgcgctaatgccctcagaccgagactatcatacaacactccgcgctcatataaaagctgtgcgcgttcgtcatcggttaaagcccgactggcaaggatttgttccatacgtgccagaatcacttcctgctgtaaagtcggttgcaatggtaccgcgaggacttcacttttacgccaggaagtattactgcatcctgcaagcgtaagtgctgtcgcaacgaaacaccagcgcaaaaaaggcttcatttcccactcccgaagaccacggttgaatgaacgtcctgttcccggttgctaacaaggcgtcctgcccggttaaaagccccccgccgcagcggagggcaaatggcaaccttactcgccctgttcagcagccggagcttccggtgctgcagcaggttgagactgctcagtcgcttctttaatgctcagacggatacggccctggcgatcaacttccagaactttcaccggtacttcctgacccatctgcaggtaatcggtcactttctcaacgcgtttgtcagcgatttgagagatgtggaccagaccttctttaccgccgccgatggcaacaaatgcgccaaagtcaacgatacgggtcactttaccagtgtagacgcggcccacttcgatttctgcagtgatctcttcgatacgacgaatagcatgtttcgctttctcgccgtcggtcgctgcaatcttcacagtaccgtcatcttcgatttcgatggtggtgccagtttcttcggtcagagcacggattacagaaccgcctttaccgataacatctttgatcttgtccgggttgatcttgatggtatggatacgcggtgcgaactcagagatatcgccacgcggcgcgttgatcgcctgttccattacgcccaggatatgcagacgcgcacctttagcctggttcagcgcaacctgcatgatctctttggtgataccttcaattttgatatccatctgcagtgcagagataccgtcgcgggaacctgcaactttgaagtccatatcgcccaggtgatcttcgtcgcccaaaatgtcagacagtacaacgtagttgtcgccttctttcaccagacccattgcgatacccgcaacggcagctttgatcggcacacctgcgtccatcagcgccagagacgcgccgcacacggaagccatagaagaggaaccgttggattcagtgatttcagacacaacacgtacggtgtacgggaatttgtccatatccggcatgactgccagcacgccgcgcttcgccagacgaccgtgaccaatttcacgacgcttcggagaaccgaccatgccggtttcgcctacggagtacggagggaagttgtagtggaacaggaaggtatcggtacgttcgcccatcagttcatcaagaacctgcgcgtcacgagcagtacccagcgttgcggtaaccagcgcctgcgtttcaccacgggtgaacagcgcagaaccgtgagtacgcggcagcacgccagtacgcacatccagaccacggatcatatctttttcacgaccgtcgatacgcggttcgcctgccagtacgcggctacgaacaacgtttttctcgatcgcgtgcagaatttcacccagttcgttttcgtccagggtttcgtcttcagcaagcagcgtcgcgatggtttcagatttgatgacatcaacctgcgcataacgctcttgtttgtcggtgatgcggtaagcatcgctcaggcgagcttcagccagtgcagcaacgcgcgcgtttagcgcttcgtttaccggctccggctgccagtcccaacgcggtttaccggcttctttcaccagttcattgatgttctgaataacaacctgctgttgttcatgaccgaacactactgcgcccagcatctggtcttcgctcagcagttgagcttcagattcaaccatcagtacagcggcttcagtaccggcaacaaccagatccagtttgctctctttcagctcgtcctgagtcgggttcagtacgtactggtcattgatgtaacctacgcgggcagcaccaatcgggccattgaacggaataccagacagagacagcgctgcggaagcaccaatcatcgcgacgatatccgggttaacttgcgggttaacagaaaccacggtggcgataacctgaacttcgttgacgaagccttccgggaacagcgggcgaatcgggcggtcaatcagacgcgcgatcagggtttcgccttcgcttgggcggccttcacgacggaagaagctacccgggatacgaccagcagcgtaggtacgctcctgatagttaacggtcagtgggaagaagtcctgacctggtttggcttttttctggccaacaacggtaacgaataccgcggtgtcatccatgctaaccataacagcggcagtagcctgacgagccatcatgccggtttccagagtcacggtgtgttggccgtactggaatttacgaacgatcggattaagcaatgtaatatcctttctctttcttagacagtaccttacggcactggtgttaataccgcttcttctgcgcatcctcgcgactaatgacaaccctaacccagctctatgtgggtaaagcctctcattagccgcgcgaacctctgcaacggaagatcattcatagcaacaatacattagtttccagtgaattgctgccgtcagcttgaaaaaaggggccactcaggcccccttttctgaaactcgcaagaattagcgacgcagacccaggcgctcgatgagctgggtgtaacgtgctacgtctttacgtttcaggtagtcgagcagtttacgacgctgagaaaccatgcgcagcagaccacgacggctgtggtgatcttttttgtgctctgcaaagtggccctgcaggtggttgatctgtgcagtcagcagtgctacctgaacttcggtagaaccggtgtcgtttgcgtcacgaccaaactcagaaacgattttagctgttgcttcagtacttagagacattttaaaactccaaagtatatagaatgaaaggacgccgatctctaattcagcgatcccagtgtacgttacgcaaagtgttaaacaatttacgcgacgttaagcggcagtattctactcgtagcgacctgttatcgcaagacggttaacattacgccgggtattcaaccaccaggcgacgaggcgcaacgcggccttcatcgtcaatttcgcccataccgataaatttgccgttctcaccttccgtgacgcgaaccagtccttccagtggcgcaccagatgtacgaaccgggttaccatttttgaagtaaacagaagacgttaacggaagattcaccaccggatagtcgctagctggactgtccattggcatcagtaatggatcaagtaactccgcggctggaatatcctgctgttcagcttgctcaacaagttcacgcaggtgctccagggtcaccatccgttcaaccggatatttacttaccgccagacggcgcaggtaaataacatgcgcgccacagccgagtttttcacccaggtcatcaatgatggtgcggatataagtgcctttactgcagtgaatttccagctccagctcattgccttcatggcgaataaacagcaattcataaacggtaatcggacgcgcttcacgcggaacttcaatgccctgacgcgcatattcgtacagttttttgccctgatatttcagtgcactatacatgctagggatctgttcgatatcgccacggaaagtatccagtgccgctgccagctgctctgcgctaaaggttaccggacgttcttcaacgatctgtccgtcggcatcagaagtatcggtacgctgtccaagacgcgcaatgacccgatagcgtttgtcggagtccagcagatactgggaaaacttcgtcgcttccccgaggcaaatcggcaacatgccggtcgccagcgggtccagcgcaccggtatgcccggcacggttggcgttatatatacgtttcactttttgcagcgcatcgttgctggacataccctgaggtttatccagcaacaaaacgccgttaatgtcgcgaccgcgacgacgaggacgactcattagtcctccttgctgtcgtccgggttaacacgacgttcttcgtcatgtttgaccacgctggtcaccaggttactcatgcgcatcccttcaaccagagagttgtcgtagaagaaggtcagttccggcacgatacgcaggcgcatcgctttccccagcaggctgcggatgaaaccagaagcttcttgcaacgctttgatgcccgctttaaccgcgtcttcatctttgtcgttgaggaacgtcacatatactttggcatacgccaggtcgcgagacatttcgacaccggaaacggtggtcatcatgcccaggcgaggatctttaatttcacgctgcaggatgagagcgatctctttttgcatttcctgcgctacgcgctgcgggcgaccaaattctttcgccataataaattctcctgacaaaaaaggggctgttagcccctttttaaaattaatttcaggtggaagggctgttcacgttgacctgataagacgcgccagcgtcacatcaggcaatccatgccggatgcagcgtaaacgccttatcccgcatggaaccctaaaaaccttaagcaatggtacgttggatctcgatgatttcgaatacttcgatcacatcgccagtgcggacgtcgttgtagttcttaacgccgataccacattccataccgttacggacttcgttaacgtcatctttgaagcggcgcagggactccagctcgccttcgtggataaccacgttgtcacgcagaacgcggatcgggttgtgacgtttaaccacaccttcggtaaccatacagcctgcgatggcaccaaatttcgggcttttgaacacgtcacgaacttccgccagaccgataatctgctgtttcagttccggagacagcataccgctcatcgccgctttcacttcgtcaatcaggttatagatgacggagtagtaacgcagatccaggctttccgcttcaatcactttacgtgcagaggcatcagcacgtacgttaaagccaaccaggatggcgttggacgccgcagccagggtggcgtcggtttcggtgataccacctacgccagaaccgatgatcttcactttaacttcgtcagtagacagtttcagcaaggagtcggagatcgcttcgacagaaccctgtacgtctgccttcaggacgatattcacttcgtgaacttcgccttcggtcatgttggcgaacatgttctcgagtttagatttctgctgacgcgccagtttaacttcgcggaatttaccctgacgatagagtgcaacttcacgcgctttcttctcgtcacgtacaacggtaacttcatcacccgcagccggtacgccggacaggccgaggatttccaccggaatggacggacccgcttccagcacttcctgacccagttcgttacgcatcgcacgaacacgaccgtattcgaagccacacagaacgatatcgcccttgtgcagagtaccttcacgtaccagaacggtagcaaccggaccacgacctttatcgaggaaggattcgataaccgcaccgctcgccatacctttacgtaccgctttcagctccagaacttccgcctgcagcaggatagcgtccagcagttcatcgataccggtacccgctttcgcagatacgtgtacgaactggctttcaccgccccactcttccggcaggatgccgtactgggagagttcgttcttaacgcgatccggatcagcttctggtttatcgatcttgttcactgcaaccaccaccggtacctgcgccgctttcgcgtgctggattgcttcgatggtctgcggcatcacaccgtcgtcggcagcaacaaccaggactacgatgtccgttgcctgcgcaccacgagcacgcatactagtaaacgcggcgtgccccggggtgtccaggaaggtgatcatgccgttttcagtttcaacgtggtatgcaccaatgtgctgggtaatgccgcccgcttcgccagaggccactttcgtactacgaatgtagtccagcagagaggttttaccgtggtcaacgtgacccatgatggtcacaaccggcgcgcgcggttcagccgcagcacccgtgtcacggtcgctcattaccgcctcttccagctcgttttcacgacgcaggataactttatggcccatctcttcagcaaccagctgtgcggtttcctgatcgataacctggttgatggttgccattgcgcccagtttcatcatcgctttgatgacctgagagcctttaaccgccatcttgttcgccagttcgccaacggtgatagtttcgccgatcacaacgtcacggttaacggcctgagcaggcttctggaagccttgctgcaggctagaacctttacgttttccgcctttaccgccacgtactgctgcgcgtgcttcttcacgatcagctttactttcagcgtgtttgttgcctttcttcggacgcgctgctttcgcgttacgaccacggccacggccgccttcgacttcacgatcgctttcgtcttctgcctggcgagcatgttgagaagtagtgacgtgataatcgctggaatcttcagtcggttccgcgttatcagtccatttgttttcttccgccatacgacgtgcttcttcagcaacgcgacgtgcttcttcttcgagtttacgacgcgcttcttcttcagctttacgcttgagctctgcagcttcctgctcacggcgggctttttcagcctgggcgtttttagtcatatcgtcttgttgattgctcactttgtctttttccgcagcttcacgtttcgcttgttcagcagcttcacgcttagcttgttctgcggcctcacgttcagctttttgttgcgcctcgcgtttagcgctttcttctgcctcacgacgggcttgctcttccgcttcacgctgcgcttgctcttccgctgcaaggcgttcagcctcttgcggatcgcgtttcacaaaggtgcgtttcttgcggacttcgatttgtacgcttttgctttttccaccggtaccaggaatgttaagggtgctgcgtgttttacgttgcagcgtcaatttgtccgggccactatttttctgattcaggtggtcaatcaaagtctgtttctcttgtgcagacacagagtcgtcagcagacttccggatacctgcatcagcaaattgctgtaccaggcgttccacggaggtctgtcgctctgcggccagcgttttaatcgttacatctgtcatgctgttccttcctgctacagtttattacgcttcgtcaccgaaccagcaaatattacgggcagccataatcagtgctccggctttttcgtcggtcaacccttcgatatcagccagatcatcaatgccctgttcggcgagatcttccagcgtacaaacgccacgggcggccagtttgaatgccaaatcacgatctaccccttcaaggttcagcagatcgtcagccggtttgttatcaccgaggctttcttcctgggcctgtgcaatggtggccagtgcatttttagcacgctcgcgcagtgcttcaacggtcggctcatcaaggccttcgatttccaacagctctttcatcggcacataggccaattcttccagcgtgctgaagccttcttctaccagaacagtcgcgaagtcttcgtcgatgtcgagatatttggtgaaggtgtcgatcgctgcgtgcgcttccgcctgatgcttagcctgcaggtcgtcaacggtcatcacgttgagttcccaaccgctcagctggctagccagacgcacgttctgaccgttacggccaatcgcctgcgccaggttaccggcttcaacggcgatatccatggtgtgtttatcttcatccaccacgatagaagcaacgtctgccggtgccattgcgttaatcacgaactgcgccgggttatcatcccacaggacgatatcgatacgctcgccacccagttcagtagacaccgcctgaacacgcgcgccacgcatacctacgcaagcacctaccggatcgatacgtttatcgttggttttcaccgcgattttcgcacgagaacccggatcgcgagccgctgctttaatttcaatcacttcttcgccgatttctggcacttcaatacggaacagttcgatcagcatttccggcttggaacgagtgacgaacagttgcgcgccacgcgcttccgggcgaacggaatagagcacgccacgaacgcggtcgccagggcggaagttttcacgcggcagcatatcttcgcgcaggatcacggcttcagcgttgttgcccagatccagagagatgttgtcgcggtttacttttttcaccacgccggtgatgatttcaccttcgtgttcacggaactgatcaaccaccatcgcacgttcggcttcacgcactttctgcacgataacctgttttgccgtctgggtagtgatacggtcaaaggtaacagactcaatctgatcttcaacgtaatcgcccaggttcaggctttcatcttcataacgtgcggcttcaagggtgatttccttggtcggctgggtgacttcatcaacaactaaccagcgacggaaagtgtcaaaatcaccgcttttgcgatcgatctgtacgcggacgtcgatctcttgttcatattttttctttgttgctgtcgccagcgcgctttccaatgcttcgaaaatcttctcgcgaggtagcgccttttcattggatacggcttcaactacagccaaaatttctttgttcatcgcgggcttttcacctcatccagactattaaaagtggggaaccaggttcgccttctggatattactcagcgcgaacacttcatctttaccttcgacggtaactgtgatcatttcaccgtctaccgctttgataacgccctgccatttacgacggttttgtaccgccatacggagaaccagagtcacctcttctccgacaaaacgggcgtagtgttcagccgtgaacagtgggcgatcgagacccggactggagacttccaggttataagcaacggtgatgggatcttcaacatccagcacagcacttacctggtggctcacatcagcacaatcatcaacattgatgccatcttcactatcaatatagatgcgcagtgtggatgtgcgaccgcgaataaattcgatgccaaccagttcaaaacccagggcctcaactggcgcagtaatcatctctgttaatttttgctctaatgtggacaagcccacccccaagacataaaaaaagggcctaaagcccagttattctgtagtcagataacaaaaaaccccgataaatcggggctttatataactgaaccctataaccgcaactgcggtctggagcactttccagaaggattttttcaaatcccactacgaaggccgaagtcttcacagtatatttgaaaaaggactctaagggaaagtggttgcgggggccggatttgaaccgacgatcttcgggttatgagcccgacgagctaccaggctgctccaccccgcgcctgaaacgtggcaaattctactcgttttgggtaaaaaatgcaaatactgctgggatttggtgtaccgagacgggacgtaaaatctgcaggcattatagtgatccacgccacattttgtcaacgtttattgctaatcatgtgaatgaatatccagttcactttcatttgttgaatacttttgccttctcctgctctcccttaagcgcattattttacaaaaaacacactaaactcttcctgtctccgataaaagatgattaaatgaaaactcatttattttgcataaaaattcagtgagagcggaaatccaggctcatcatcagttaattaagcagggtgttattttatgacgacgattctcaagcatctcccggtaggtcaacgtattggtatcgctttttctggcggtctggacaccagtgccgcactgctgtggatgcgacaaaagggagcggttccttatgcatatactgcaaacctgggccagccagacgaagaggattatgatgcgatccctcgtcgtgccatggaatacggcgcggagaacgcacgtctgatcgactgccgcaaacaactggtggccgaaggtattgccgctattcagtgtggcgcatttcataacaccaccggcggcctgacctatttcaacacgacgccgctgggccgcgccgtgactggtaccatgctggttgctgcgatgaaagaagatggcgtgaatatctggggtgacggtagcacctacaaaggaaacgatatcgaacgtttctatcgttatggtctgctgaccaatgctgaactgcagatttacaaaccgtggcttgatactgactttattgatgaactgggcggccgtcatgagatgtctgaatttatgattgcctgcggtttcgactacaaaatgtctgtcgaaaaagcctactccacagactccaacatgcttggtgcaacgcatgaagcgaaggatctggaatacctcaactccagcgtcaaaatcgtcaacccgattatgggcgtgaaattctgggatgagagcgtgaagatcccggcagaagaagtcacagtacgctttgaacaaggtcatccggtggcgctgaacggtaaaacctttagcgacgacgtagaaatgatgctggaagctaaccgcatcggcggtcgtcacggcctgggcatgagcgaccagattgaaaaccgtatcatcgaagcgaaaagccgtggtatttacgaagctccggggatggcactgctgcacattgcgtatgaacgcctgttgaccggtattcacaacgaagacaccattgagcagtatcacgcgcatggtcgtcagttgggccgtctgctgtaccaggggcgttggtttgactcccaggcgctgatgctgcgtgactctctgcaacgctgggttgccagccagatcactggtgaagttaccctggagctgcgccgtgggaacgattatagtatcctgaataccgtcagtgagaacctgacctacaagccagagcgtctgacgatggaaaaaggcgacagcgtgttcagcccagatgatcgtattggtcaattgaccatgcgtaacctggatatcactgatacccgcgagaaacttttcggttatgccaaaactggcctgctttcctcctctgccgctagtggcgtgccgcaggtggagaatctggaaaacaaaggccagtaattcgacatcaaccctgcccttcaggggtggggttaccttgcttatcctctgtaaactcctttctgagcatcacataatcgaaaacatcatggtttgcatccacaacccgactgtctcctttatagtgtgcaatcacttcctcaagcgtttgcggctgttccggctttgttacccccatccacgcattaataaggtaattattgtaagctgtgctaaagatgttgttttccgttgtgcgatccacgccatccccaagaacggggctataccagataaacatcgggacatgatatgcctgctggctagcctccctgcctccatgaaaatagacgttcttcttcgtagggtcacgttccaggccgtggtcggcaaaatacatgacgctggcgcggcgatcttttaataattcaaaaacctgacctagcaaactatctgtgtaatgaatggagttgtcatagcaggcatcctgatcgtcctgcggttgaaacacggcgctggattgcggataggcgctacaagccggttcatggcttccatttaaatgaagaacaatcagtttcttttgctgcgtattttgctgtaatgcttggcttaaatgcggcaacaacaattcatcaaatcctctgacataaactgtttccatggcgcgcatggcgatactggtaactgctgtaccattctgccgaaaagcggattggctgcttagccagaaagtctgaaatcctgcttgattagccatattaataatgttgtcggggtaattatgaatgtcatgactcaaaacagaatcagcagttaaagaaaggggaacgctcagcgcagtgtaaggtgcgccgcttattgcttgattaaacagtttgatctgttttctttgtgcttcaacttgcggtgtcgtagagcgtgtatatccatacaaagacatattgtcgacacgtacagactcccccacaatcaacacgtaggtatcaatacctgtatccctgacacttaattgaaaatacggcaccgtgtttgcaatactgagtaatctttgatgctctttcgctgctaaagcaaaatagttgagattgaaaaacggcgtataggtagcaaatcggctcgctagtatatatggactgaacgcttttttattttttgcatctttataagcaaattgacaagcggaaaataaactgccgctaatgacaatcagcaataatattcctgtcactttttttgtcggcaaggaaacatcatattttattattactgccaaaaaaagaagggataaaaaagcaaaggcacatagataagggatatacatccccagcattttgacaacttcatccggatcactctggagcacactaatcgcaaatccatcattgaaagttgtaccaaaggtacaccaactatagaggctaatactcatgtctgccgcagtcagtaacacaaatggtgcggcaacaagcaggcgaagcggaagggaacttatacgttttacaaccaggatggtcagaacgaagaacagcaagcgctgaaccatatgcgctccggaagaagcgactaagttcgtaataccaaaaacaataacacaaagatacaacaaccaatgagatttaaaagttctagcaaatttgttgaatactgtcatccagaaatccaagttcacaaccaatataaacaattatcaacaatgtttaattttatatcagacatgtttttcaactctgatccatatcagaacgaaacactgttagttttttctttttaaatgatgcggccattgcgttctcagtaattaaataacattatcaatgcgtctctaaacattacgcagaacgtagccatcagtcgttatactgacaggagcaggatggtttatcgagaagtaaacatatccgtattcgtaccggaactggagttgacacaataaagtgccaattatgtcagtagaagggaaaaatttataactaaggcgtaccggcaccatcgtttcaaggtaccagctacgagtaaagcaactggacgagatacagatacctgacaaccattcctcagaccaggaccaaaacgaaaaaagacgcttttcagcgtctcttttctggaatttggtaccgaggacgggacttgaacccgtaagccctattgggcactaccacctcaaggtagcgtgtctaccaattccaccacctcggcacggatactactttttagttcgggatatcgctggtcggcttagccggagcagctggctgagtttgttcggttttcgccggtgcactcagattttcccattcgctacctttattggttttgttgctattgatgttacccagcaccagactgatgatgaagaataacgttgccagcagcgccgtcatgcgggtcatgaagttaccagaaccactactaccaaacagcgtagcggaagcgcctgctccgaaggaggctcccatatcagcgcctttaccttgctgcagcatgatcagaccaacaaggccaattgccacaataaggaaaactactaaaagagcttcatacataatcaacctgttccttgcggagttgccgcgtaccaatgcttcaaccaataaagcgggagtttttaatcttccccactgaagcgggtgtgaatactaaccaaagcgaatgaccttcgcaagggcaattttatcgcattgtatcaactgcggaaaaaaacagcaaaaccgatgtgttcgctgagaaaaaaggcgacaatcgccgcctttttagccagttatctaacgctttaaacggcttttactgcatcggcgatgcggtgtgcaaattcagtcacctgcgcttcgtcttcgccttccaccatcacgcgaattaacggttcggtgccggatttacgcagcaacacgcgtccacggttgcccagcgcagcttcaacctctgcggtcacggctttaacactctcatgctcaagtggatcgccgctacctgcggtgtaacgtacgttaaccagaatctgcgggaacattttcatgccgctgcaaaggtcgtgcaggctcatatggttacgtgccatcgccgccagcacctgcaagccagcaacgatgccgtcaccggtagtagttttatccagcaggatcacatgaccggaattctctgcaccgatacgccagcctttctcctgcattttttccagtacgtagcggtcacccactttcgcgcgcgcaaatggaattcctaactgtttcagcgccagttcaagccccatgttgctcatcaatgtacccacagcgccaccacgcagctggccctgacgaagaccttcacgcgcgatgatatacatgatctgatcgccatcgactttattgccttcatggtcaaccataatcacgcgatcgccatcgccgtcgaaggcaataccgagatccgctttttcagccagcacacgagcctggagcgcgcgaacgtcggtagcccccacttcggcattgatgtttacaccgtttggctcacaaccgatagcgataacgttcgcccccagttcgcgcagcacgttcggcgcgatgtgataagtcgcaccgtttgcacaatccaccacaatcttcagttcactgaggctaagttcgttcgggaacgtggctttgcaaaactcgatatagcgacccgcggcatcaacgatacggctggctttacccagttctgcgctatcaacgcagctgatctccttttccatttccgcttcgatggcctcttctaccgcatccggcagtttggtgccgtcgatagagaagaatttaatgccattatcgtagaacgggttatggcttgcagatatcacaattccggcctctgcgcggaaggtacgcgtcagataagccacggccggtgttggcatcgggccagtgaagagtgcggaaaggcccgctgccgccagacccgcttccagtgcactctccagcatatagccagaaatacgcgtgtctttaccaataataatcttacgggagccgtggcgcgccagcactttacccgcggcccaacccagcttaagcacaaaatcaggtgtgatcggcgcatcccctacacgaccacgaatcccatcggtaccgaaatatttacgattactcatagcgtttgttttcctttgcagacagagtggcttccaccacccgcatcgcttctacggtttctttgacgtcatgaacacgaatgatgtgcgcgccttgcattgcggcaatgaccgcacaggccagactaccgctcaggcgctcggacggccccacgttcagcagctgcccaatcatgctttttcgactcatacccaccaacagcggcaggttgaaatggtgaaattcagccaggcgcgccagtaaactatagttatgggagagatttttaccgaaaccgaatccggggtcgagcaacaatttctcttttgcgatacccgcctgctcgcaacgtgctatttgctcaataaagtagcgattcacttctgcaaagacatcgtcatacttcggagcttcctgcatggtttttggatttccctgcatatgcatcagacaaaccggtaaaccggtttctgcagccgcctccagagcgccaggttcggaaagggagcggatatcattaataatgtgagcgccaactttcgcactctcacggatgacttctggtttggatgtatcgacactgatccagacttcgaagcgttgagcaattgcctcaaccacaggaataacacgttgcaactcttcttcaacgctaacttccgccgcccctgggcgcgtggactcgccaccaacgtcaatgatcgtcgcgccagcgttgatcatcagattcgcatgtttcaccgcatctatcaggctgttatgcgtgccaccatcgctaaaggaatcaggcgtgacgttgaggatccccattacgtgaggatggctaaggtccagactagtaccctgggcaaagagtttcatgatgttatccctggtatgaattgataagaaaaaaccccggagcacgccccggggttttcggtacaaatacagtcatctgatgcgggaacttacttgtcgcctaactgctcactcatggtgttacccgggttcggcgtacgcggttcatcaaccggacgaggagcctttggactaccattgtcgccagaattgttagaagcgcctggttcttcccagcccgctggcggacgtacatcgcgacgtgccatcaggtcatcaatctgcggtgcgtcgatagtctcatatttcatgagagcatctttcatcgcatgcagaatatccatattgtcggtcagaagctgacgcgcacgattatagttacgctcaatcagtgctttcacttcctggtcgatgatacgtgcagtttcatcggacatatgtttcgctttcgctacgctacggccgaggaacacttcaccttcttcttccgcgtacagcagtggacccaatttctcagagaagccccactgagtcaccatgttacgtgccaggttggtcgcaactttaatatcgttggacgcaccggtagatacatgttccggcccgtagatgatctcttctgccagacgaccaccgtacagcgtagaaatctggctttccagtttctgacggctggcgctgattgcgtcgccctcaggcaagaagaaagtcacacccagcgcacgaccgcgtgggataatcgtcactttgtgcaccggatcgtgttccggcaccaggcgaccgataatcgcatgacccgcttcgtggtaagccgtgctttctttctgcgcttccgtcatcaccatggagcgacgttccgcacccatcatgattttgtctttcgctttctcgaactcaaccatgctcacaacgcgtttgttgccacgagcagcgaacagtgccgcttcgttcaccaggttcgccaggtcagcaccggagaaaccaggagtaccacgggcaatgattgccgcgtcgatatcgggtgccaatggtacgcgacgcatgtgaactttcaggatctgctcacgaccgcgaacatctggcaagccgaccacaacctgacggtcgaaacggccaggacgcagcagggccgggtcgagaacgtccggacggttagtcgcggcgataacgatgataccttcgttaccttcgaagccatccatctcaaccagcatctggttcagagtctgttcacgttcatcgtgaccaccgcccagaccagcgccacgctggcggcctacggcgtcgatttcatcgataaagatgatgcacggtgccgctttcttcgcctgttcgaacatgtcacgaacacgggatgcacccacaccgacgaacatttctacgaagtcagaaccggagatagtaaagaacggaactttcgcttcgcctgcaatcgctttcgccagcagcgttttaccggtacccggaggaccgaccatcaagacgcctttcgggatcttaccgccgagtttctggaagcggctcggctcgcgcagatactcaaccagttcagcaacttcttcttttgcttcgtcgcagcccgcaacgtcagcaaaggtcgttttgatctgatcttccgtcagcatgcgcgctttgctcttaccaaagctcatggcacctttgccaccgccgccctgcatttgacgcatgaagaagatccagacaccaatcagcaacagcatcgggaaccaggagatgaagatagaagccagcaggcttggttcttcaggcggttcaccgacaaccttgacgttcttggtcaacaggttatccagtaatttcggatcctgaaccggaatgtaagtggtataacggttactatctttcttggtaacgttgatttcacgtccgttgatacgcgcttcacgaacctggtcgttattgacctcttgtaggaaggtagagtaatccaccttacggccattagactcgctgggcccaaagctctggaatacactcatcagcacaacggcaatgaccagccagagtattaggtttttcgccatgtcactcaagggattaacctcttattacaactgtgttaaaaacagcgtcaggatactctatatccagcatctttcaaactttcgtctgaaatctcccggttagggtttacgcccggtcgctacaatatacacttcccggctacgtgcacgagaagagtccagcttacgaactttgaccttcgtaaacagggagcgaatttcccttagatactcatcgaaaccttcgccctggaacaccttcactacaaaactgccacctggcgctaatacatcacgacacatttctagcgccagttccaccagatacatggcacgggggatatccaccgccggtgttccgctcatgtttggtgccatatcggacatgacaacctggactttgctgtcgccaacgcgctccagcagtgctttcatcaccagttcatcacgaaaatcgccctgaagaaagtccacaccaacgataggatccataggtaaaagatcgcaagcgatgatgcggcctttgccgccaatttgggtgaccacatattgactccaaccacccggagcagcaccaaggtcgacaaccgtcattcccggtttaaagagtttgtcactttgctgtatttcatcaagtttaaaccaggcacgggaacgtaacccctttttctgtgcctgttgaacatatttatcgctaaagtgttcctgaagccagcggctggagctggcagaacgcttcttacctgtcatttaactttcccatggggataactcatcgtaaccaattgcgtaaatttttacgcgcctatttggtgatatatgggagatggcggtagaatgacccgttttcaatcccaacgtaagcaaaaaatacgatgaatctgagtactaaacaaaaacagcacctgaaaggtctggcacatccgctcaagccagttgttctgcttggcagtaatggtttgaccgaaggggtgctggccgagattgaacaagcgttagagcaccatgaactcatcaaggtgaaaatcgccaccgaagatcgcgaaactaaaaccttgatcgtggaagctatcgtgcgcgaaaccggcgcctgtaatgtacaggtcatcggtaaaacgctggtgctttatcgcccaactaaagaacgtaaaatcagcctgccacgctaagattatcctaaagttacacacatttgctgtgtaaaacgaggggttttccgcaggcaggagagcaaaatgccacgctctgttcgttgataaaaggccgcatagcggcctttttcctttctttacaatacatcaacatcttgagtattgggtaattcttacaggtattccaccttaattacttcaaattctacttcgccgcccggcgttttgatgaccacaacatcatcttcttctttgccgatcaggccacgagcaatagggctgtttacagaaatcaggttttgtttaaagtcagcttcgtcatcgccaacgatgcgataagtctgttcttcgtcagaatccagattcagcaccgttacggtagcaccaaaaataacgcgcccattgttgggcattttggtgacatcaatcacctgcgcgttgctcagcttggcttcgatgtctttaatacggccttcgcagaaaccctgctgttcacgagctgcgtggtattcggcgttttctttcaggtcgccatgctcacgcgcttccgcgatagcagcaatgatttcaggacggcgcacagatttcagaaaatccagctcttcgcgtaatttttcagcgccgcgtaaggtcatcggaatagcttgcatttgttatacctcttgaatattcctgatagggcaagtcttcacccaccccggctgttcggcctgcccggcataactccttaccgggaccagaagcaaaaaaataccgacccgggtacaagtcccaggtcagctacaattcacattttgatagtcattttaccctgaagttcccgaagggtcatcgtttactttatagggcgttgcgccgtagtatgacggctcgattccaggttgttagcgcgagattatgcgattttccagatttatcatcggattgaccagctgtatagcgttcagtgttcaggccgcaaatgttgatgagtacattactcaactccccgctggtgccaaccttgccctgatggtgcaaaaagtcggcgcgagcgcccccgctattgattaccacagtcagcagatggcgctgcctgccagtacccagaaagtgattactgcgctggcggcgttgattcaactcggccccgattttcgttttaccacgacgcttgaaaccaaaggcaatgtggaaaacggcgtacttaagggtgacttagtggcgcgatttggtgccgatccgacgttaaaacgtcaggatattcgcaatatggtcgcgactttgaaaaaatctggcgtcaaccaaatcgatggcaatgtgttgatagatacctccattttcgccagccacgataaagcccccggctggccatggaatgacatgacacaatgctttagcgctccgcctgccgccgccatagttgaccgcaactgtttctccgtcagcctctacagtgccccaaagcctggtgatatggcttttatacgcgtggcatcttattaccccgttacgatgttcagccaggtacgcaccctcccccgtggttctgccgaagcgcaatactgcgaactggatgtggtgccaggcgacctgaaccgctttacgctgacgggatgcctgccacaacgttctgagccgctcccgttggcttttgccgtgcaggatggagccagctatgccggtgcaattctgaaagatgagttaaaacaggcgggtatcacctggagcggaacactgctgcgccagactcaggttaacgaacctggaacggtagttgccagtaaacagagcgccccgctgcacgatctgcttaagattatgctgaaaaagagcgacaacatgatcgccgatacggttttccgcatgataggccatgcgcgcttcaatgtgcctggaacatggcgggccgggagcgacgccgtgcgtcagatcctgcgccagcaagccggtgtcgatattggaaacaccattattgccgatggtagtgggcttagccggcataacctgattgcccccgccaccatgatgcaggtgctgcaatacattgcccaacacgacaatgaacttaactttatctccatgctgccgctggcgggctatgacggctctttgcagtaccgtgcaggtctgcatcaggcgggcgtggatggaaaagtcagtgcgaaaaccggtagcttgcagggggtatataacctggcgggattcattaccacagcgagcgggcaacgaatggcgtttgtgcaatatctttctggctatgcagtagaacctgcggatcagcgtaatcgccgtattccgttagtgcgttttgaaagccgtttgtataaagatatttatcagaacaattaatcaaaaagaaaccccggcacatggccggggcttcagattattgacaaagtgcgctttgtttatgccggatgcggcgtaaacgccttatccggcctacaaaatcgtgcaaattcaacatattgcaattctcttgtaggcctgataagcgtagcgcatcaggctgatttggcgtttatcatcagtgattaacgcttgtaaatgaactcaacgccttcttcgtcgtcttcgtcccagtcgtcatcccagtcttcatcatcctcttcagcaatctcttcaagctgctggcgatgataatcatcccacatgaattcgactttctctggctgtttcgcttcttcagcctgcacgaccgggttttcaatgataaaggtcatcacatcccagcagagatctttcacgcccagtccactcgccgcagagatcagataatatttatcttcccagcccagcgcctcagcgatcgctttcgctttctcttcggcttctaccttatccagcagatcgatcttgttgaacactaaccaacgcggtttcgtcgccagatcctggctgtatttttccagctcgctgataataatacgcgcgttttcaaccggatcggtgccgtcaatcggatcgatatcgatgaggtgcaacaggacgcggcaacgttccaggtgcttcaggaagcgaatgcccagacctgcgccttccgcagcgccttcaatcagtcctggaatatcggcaacaacgaagctcttttcgttgtccattcgtaccacacccagacttggcaccagagtggtaaacggataatccgccactttcggtttagccgcgcttaccgcacgaataaaggtgcttttacccgcgtttggcatccccaacataccgacgtcagccagcagcatcagctccagcagcagctcgcgcttatcgcccggcgtgccgttggttttctgccgcggtgtacggttaacggagcttttgaaacgggtattgcccagaccgtgccagccgcccttagcaaccagcagacgctgaccgtgtttggtcatatcgcccatggtttcaccagtaccctggtcgattacacgcgtacctaccggcactttaatcgtcacgtctttaccgcgcttaccggtacagtcgcggcttgcgccattctgaccgcgctctgcacggaaagatttttcaaaacgataatcgataagcgtgttcaggttctcgtcggcttccatccatacgtcaccaccatcaccgccgtcgccgccatccgggccgcctttcggaatatacttttcgcggcggaagctcacgcaaccattaccgccatcacctgcaacgaccagaatgcttgcttcatcaacaaacttcattttattctccgtaaatcattcgcctgcgcggggttggcttaccaccgttgtatgcttacgtaatccgccccaaatacgatgaccaatggcggaatacatcgcgcccgcaaccacgacaaacgcaccgagataacctaaaaggtttaacatcggtctggcgaagaaatcgggccaggccagacttaaaagatcactaaaaaacagcgtaaacagtggggtgagcgtgatgatcgcgctcacctgcgctgcctgccagcgagccatcgcttccgccagggcgccatatcctaccaaggtattcagtccgcaaaaaattaaacatgcgagctgccagtggctaagctgcgctatcactccaggctttgccagagggaagagcgcaattgtacataaagtgtacagtaaaaacaggatctgcggactggccagccgacgcaataaaaccttttgcgccacgccataactcacccaaaccgtcgccgcaccgaccccaaagataactccccaggtgtaatcggtgagctttgtaaatatctcgaccagactggtgttaaaaaacatcaccaggccgctcaggagcatcaatgcccctacaacctgagtgctgcgcattttctctttgaggataaatacgctggcaaccatcatgccaactgggctgagttgcccaatcacctggctagcggtcggactcaggtattgcaaggaactgctgaacaggatgaagttcccaaacagcccggcggtcgccactgccaacaaaatcaaccagcgtggcttacgaaacacgcgtaatggcggcaacctcttcttcaccgcaagaatggcacccaggccaatactcgccatcaagaaacggtaaaacacgattgtcggaggttccatcacctccagcacctgcttcattgcgattggcaacgccccccagcaaattgctgtggtgagcgccaaaagaatgccaatgcctgcctgctgcttcataccgtattccctgcaaagcgcatttgcggattaacgtcgcaccatgcgcatttttaccggttatcgaatgtaaaaagccccgcaacgtgttgcggggctttcatccgttaccgggacgcgaaaaacttattcagcttcgatgctgataaatttacggtttttcgggcctttaacttcgaatttcactttaccgtctgctttagcaaacagagtgtggtcacgaccgcaacctacgttagcgccagcgtggaatttggtaccacgttgacgaacgatgatgctacccgccagaacggattcgccaccgaaacgcttaacgcccaggcgtttagcttcactatcgcgaccgttacgtgtggagccgccagcctttttatgtgccatttgaaatctctcctcaggtcttaggcgctgatgccagtaattttcacatcagtgaaccactgacgatggccctgctgcttacgatagtgtttacgacgacgaaacttaacgattttaactttctcgccacgaccgtgagcaacaacttcagctttgattacgccgccatcaacgaaaggaacgccgattttgacttcttcaccgtttgcgatcatcagcacttcagcgaactcaacagtttcgccagttgcgatgtccagcttttccaggcgaacggtctgaccttcgcttactcggtgttgtttaccaccactttggaaaaccgcgtacatataaaactccgcttccgcgcacaccttttcaatgattcagagtgcgctataaatattcacaatagggcgcgaatattacgcaaaacgcacgcctttgacaagtgctacagtcaatacacgaagaaaaaaaacacaacttgtacggtaacgtttatctgtgccattttttcagtacaatcaccctatattcctaaccataaaccctaagttgcctttgttcacagtaaggtaatcggggcgaaaagcccggcttttgcgatgaatttagaaaaaatcaatgagttaaccgcgcaagatatggcgggtgttaatgcggcaatccttgagcagcttaattccgacgtccaactgatcaatcagttaggctattacatcgtcagcggcggcggtaaacgtattcgtccgatgattgctgtactggctgcacgagctgttggctatgagggaaatgcgcatgtcaccattgctgccctgatcgagtttatccacacggcgactctgctacacgacgacgttgtggatgaaagtgatatgcgcaggggtaaagctaccgccaacgccgcatttggcaatgccgccagcgtgctggtaggcgattttatttatacccgcgctttccagatgatgaccagcctcggtagcctcaaagtgctggaagtcatgagtgaagccgtaaacgtcatcgcagaaggtgaagttctgcaactgatgaacgttaacgatccggacatcactgaagaaaactacatgcgcgttatctatagcaaaaccgcgcgtctgtttgaggctgccgcgcagtgttccgggattctggctggctgtacgccggaggaggagaaaggcctgcaggattatgggcgctatctcggcactgctttccagttgatcgacgatttactcgattacaatgccgatggcgaacagttaggtaaaaatgtcggcgacgatctgaacgaaggtaaaccgacgctgccgctgctgcatgcgatgcatcatggcacaccagaacaggcacagatgatccgtaccgccatcgaacagggtaacggtcgccatcttctggaaccggttctggaagcaatgaacgcttgtggatctcttgaatggacgcgtcagcgtgccgaggaagaagcagacaaagccatcgcagcgttacaggtgctcccggacaccccttggcgagaagcactcatcggcctcgcgcacatcgctgttcaacgcgatcgttaatcccctcccctcatcccgcgcagcgcgcgggatggttccagtaagttccataaaaacacttattcagctctataacacctgaaaaatagggatgtgcatctttatatattctgaatattcacactctttacaggaactttttagagcaataggccatcaggagtatagtgatgctcgacagaagaagtgttctgaatgaaagcgactaacttaaggagtgaggaaaaatggaaagtaatttcattgactggcatcccgctgacatcattgcgggtttgcgcaagaagggaacgagtatggcggcggaatctcgcagaaatggtttgagttccagtacgctggcgaatgcattaagccgcccatggccgaaaggagagatgattattgcgaaagccctgggaactgacccctgggttatctggccaagtcgctaccatgatccgcagacccatgagtttatcgacagaacgcagttgatgcgtagctacactaaaccgaaaaaatgagtggtctggcggtagccccgcgaacggggctgccagctctcagacgattattcgcctttcacacgctcaatatttgcacctaaagcgcgcagtttgtcttcaatgcgttcgtagccacgatcgatgtgataaatacgatcaaccaccgtcgtcccttccgcaatacagccagccagcaccaggcttgcacttgcacgcagatcggttgccataacctgtgcgccagaaagtttttcaacaccgtgacaaataacggtattgctttcgatttcggcgtgcgcgcccatacggctcagctctggcacatgcataaagcggttttcaaagaccgtttcggtgataaacccggtcccttctgccaccaggttcaacagcgtgaactgggcctgcatatcggtcgggaatgccggatgcggcgcggtacgtacgttaacagccttcggacgtttgccatgcatatccaggctaatccagtcttcgccgacttcgatgtccgctccagcgtcacgcagtttcgccagcacggcgtcgagagtatctggctgcgcgttacggcagataattttgccgcgagaaatcgccgccgccaccaggaaagtaccggtttcgatacgatccggcagaacgcgatagacaccgccgcctaaacgttccacaccttcgatgacgatacgatcggtgccctgaccgctaattttcgcacccagcgtaatcaggaagttcgcggtatcgacgatttccggttcacgcgctgcgttttcaataatcgtggtgccttccgccagggttgcagcacacatgatggtcaccgttgcgccaacgctgactttatccatcacgatatgtgcacctttcaaacgaccatcgacggaagctttaacgtaaccttcttccagtttgatggtcgcgcctaattgttcgaggccagaaatgtgtagatcaaccggacgcgcaccgatcgtacaaccgccaggtagactaacttgcccctgaccaaagcgcgctaccagcggccccagcgcccagatagaagcacgcatggttttaaccagatcgtaaggtgcgcagaatacattaacgtcgcgggcatcaatatgcacagaaccattacgttctactttcgcacccagctggcttagcagcttcatacttgtatcgacgtctttcagtttcgggacgttctggatctctaccggttcttccgccagtagtgcggcaaaaaggataggcagagcagcatttttagcgccggaaattgtgacttcgccctggagcttcgttggcccctgaacacgaaatttatccatttagtttgttctcagttaacaattcatatccgctaccggcgaatcgcccatagctcaaaagccgttcagtttgcgatcgcgcgcccactccgcaggggtatacgctttgatgctcacagcatgaatgcggttatccgcaatatattccatcagcggaccatagaccgtctgctgttttttaacccgactcatgccgtcaaacaactcacccacggcaataacctgaaagtggctgccatcgccggaaacgtggacttcctggagggagagagcgttcatcaacacgctctgaatttcattattttccatgggatcttcaatcatcagttaataaaccagcgaaacatcttagagcaaagttgcgctggcataaataagcaaaaagcctcgctgataaatcagacaaggctcgacttgcaggcaggtttgccggacaggcggttaacgccatatccggcctgaaaaaatttaacgaggcagaacatcagcaggcaaattatacaatttcgccagggtatacactttgtcgtttaccccctgaagcgtcacattgttgccctgctttttcgccagatcgataagatggagcagcagtgccagtccccccgtatccacgcgggagacacggctaagatcgatgcaggtaatccccttcaccgcttcctcacgcatttcccaaagcggtagcaaaacgtcctgatccagctctccggataacgccagcgtgtcacccgtctgcatccagctcagactctcgctcattattttttctcttccagagtgattttctgttgagaaatgcttttcagttgcgcagtcaggccgtcgatacctttggtacgcagcagcgttccccactcgttttgtttggtggtgatcatactgacgccttcagcaatcatgtcgtaagcctgccaattgcccgtctgggagtttttacgccactggaagtccagacgcaccggcggacggccattcgggtcaataatggtaacgcgaataggcacaatggttttatcgcccagcggctgttctggcgcaatctgataggtttgaccgtgatacatcgccagcgcctgaccgtaagcctgcttcaggtactcacggaaagcggcaaagtaggcttcacgttgagcaggggtcgcactcttgtaatactggcccagcaccagcgcaccggcgtatttcacctgtacgtatggcagcagttcctgatcaacaatggtacgcagataatccgggttggcccgaatttgcggttgctcattcttcaggcgatcgaacgttttctgcgccgcctcgtccatcagcttatacggattggtctggtctgccgcggttgccgcactcagaggtgcaatcaccagcaaagcgaccatcattaaacgtttaaacatgcgtcggttctcctgaaattatttcgttgtacccacaggttcagtggtttcattattacctggcgcagcagctggcgcatcgccactattcttattgtcatcgcctttactaccgtaaaggaactgaccaatgagatcttccagcaccatcgcagacttagtgtcctgaattgtatcgccatccttcaggatagcagtccccagttccgggtcttcaaaaccgacgtttaatgccagatattgttcccccagcaggccggaagtacgaatgctcaggctactggtatctggaatgtggttataacgttgttcaatttccagcgttacgcgcggcagataggttttcgggtccagcgtaatatccgccacccgacccacaacaacgccaccaatactgaccggagagcgcgctttcaggccgccaatgttatcgaacgtcgcataaagcgtgtaggtcggttcagtacgtatggacgtcacgttcgccgccttcaggcaaacaaacagcgccgccagcagtgctgctaataaaaagatacccacccaaatttcattttttttcgtttgcatgaactcaattcccaaacatcaatgcggtcagcacaaaatccagccccagaacagccagagagctgtggacaacggtgcgagtggttgcccggctaatcccggcagacgtcgggatggcgtcgtagccgttaaacaagctaatccacgtcaccgtgatggcgaacaccacgctcttaatcagacagttgaccagatccatacgccagtcgacggcattttgcattgcgctccagaagaacccgctatcaatgcctttccaactgacgccgaccagagatccgccccagatccccacggcgacgaaaataaccgtcaacagtggtaaactaataaccccagcccagaaacggggagaaataacccgacgcagcggatccaccgccatcatctccatactggagagttgctctgtagcgcgcatcaggccgatttctgcggttagcgcgctaccagcacgcccggcaaacaacaacgcggcaaccaccggccccagttcacgcagtaggcttaacgccaccagcatacccagactggtttccgcactataagtggtcagaaccagataaccttgcagccccaacaccattccgatgaacacgccagaaaccacaataatcagcatgctcaggacgccgacattatagagctggcgcaccagcagcggcgcatgtttgcgaaattccggtttgccgaccagcgcattgaataacattaacccggcccgcccgaacgttctcagggttttaatccctttatgtccgaggctcgccagcgcatttaacagcatgagtggcttaactccctggtaaaagatcagcgtgataatcgccggcaggatagcggaacggaacaggcccgtcagctatcccgtccagaaactgacgtacgcgcggatcaggattcgcctgcaacgcctgggcactgccatgagcgacaatttttttgtccgccaggatccaggcgtgatccgcaatacttaacacttccggcacatcgtgagaaaccaccacacaagtcacgcccagcgcgctgttcagctcagaaatcagcttcaccagtacgcccatggtgatgggatcttgcccaacaaaaggttcatcaaacatgatgagatccggctccagcgcaatcgcacgcgccagcgctgcacgccgcgccatcccaccggaaagttcagaaggcattagtttagccgctccacgcagccccacggcctccagcttcatcatcaccgtactatgcaacaatggcgcgggaagttgggtatgttcgcgcagtggataggcgacgttgtcaaatacgttcatatcagtgaacaacgccccggactgaaataacatgctcatccgtttgcgcactgtatacaggcggctacgagacatcgccggaatattctcaccatcgaaaaggatctcaccatgatctggtgcgatttgcccgccaatcagacggagtagcgtcgttttaccgatgccgcttggccccatgatcgccgtgatcttccctcgcggcacggtcagggaaatattatcgaagatgcagcgattgccacgcgtaaaactgacatcgcgcatatcgactaaattcgccacagactgctccataattcacccttcgtcttgcgttgattttctaagcatggcgctcaatttaaccttgaacccaacatatttacagaatattacccgccgtggttagcgaaagctggcatttgttttactttttagccgcataaagtcaaaattaagcatccgttacggctttctgaaaatcttcagcggaccggcgagtatacctgaagaaaggacgttagatgcttttagctacggcactgttaattgttggtttacttttggtcgtttacagtgccgaccgcctggtttttgccgcgtctattctttgccgaacctttggcatcccgccgctgatcatcggcatgacggtggtcagtattggtacaagcttaccagaagtcatcgtcagccttgccgcgtctctgcacgaacaacgcgatttagccgttggtacagccctcggcagtaacattatcaatatattgctgatcctcggtctggctgcgctggttcgtccttttaccgtccattctgatgttctacgccgtgaattacccttaatgttgttggtcagcgtggtggccggttccgtactctatgacggacaacttagtcgcagcgatggtatctttctcctctttctggctgtgctatggctgctgttcattgttaaacttgcacgtcaggctgaacgtcaggggactgacagcctgaccagagagcagcttgcagagctgccgcgtgacggcggattgcccgtcgcgtttttatggctcggcattgcgcttatcatcatgccagtggccacgcggatggtggttgataacgccacggtgctggcgaattactttgccatcagcgagttgacgatgggtctgacggcaattgctatcggaaccagcctgccggaactggcaaccgcaatagcgggggttcgcaaaggtgaaaacgacattgctgtcggaaatatcattggcgcaaacatttttaatattgtcatcgtgttgggtttacccgcgctgataacgccaggagagattgatccactggcgtacagtcgtgactacagcgtgatgttgctggtgagcattatttttgcgttgctgtgctggcggcgctccccgcaaccgggccgtggtgtaggggtattattaactggcggatttatcgtatggctggcgatgttgtactggttaagcccaatactcgttgaataactggaaacgcattatgagccacgtagagttacaaccgggttttgactttcagcaagcaggtaaagaagtcctggcgattgaacgtgaatgcctggcggagcttgatcaatacatcaatcagaatttcacgcttgcctgtgaaaagatgttctggtgtaaagggaaagttgtcgtcatggggatgggaaaaagcgggcatattgggcgaaaaatggcggcaacgtttgccagcaccggtacacctagttttttcgtccatcctggtgaagccgcgcatggtgatttaggcatggttaccccacaggatgtggtgattgctatctctaactctggtgaatccagcgaaatcacggccttaattccagtgcttaagcgtcttcacgtaccgttaatctgcatcaccggtcgcccggagagcagcatggcgcgcgccgcagatgtgcatctgtgtgttaaagtagcgaaagaagcctgtccgttagggctggcaccgaccagcagcaccaccgccacgctggttatgggcgatgccctcgctgtcgcgctgttaaaagcacgcggctttactgctgaagattttgcgctcagtcacccaggcggcgcactgggtcgtaaacttctgctgcgcgtaaacgatattatgcatacgggcgatgagatcccgcatgttaagaaaacggccagtctgcgtgacgcgttgctggaagttacccgcaaaaatcttggtatgactgtcatttgcgatgacaatatgatgattgaaggcatctttaccgacggtgatttacgccgtgtcttcgatatgggcgtggatgttcgtcagttaagtattgccgatgtgatgacgccggggggaatacgtgtgcgccctggcattctggccgttgaggcactgaacttaatgcagtcccgccatatcacctccgtgatggttgccgatggcgaccatttactcggtgtgttacatatgcatgatttactgcgtgcaggcgtagtgtaaagattcaaggataaacaacaatgagcaaagcaggtgcgagccttgcgacctgttacggccctgtcagcgccgacgttatagcaaaagcagagaacattcgtctgctgatcctcgatgtcgatggcgtactgagtgatggcctgatttatatgggcaataatggcgaagagctgaaagcgttcaatgttcgtgacggttatggcattcgttgtgcgctcacctctgatattgaagtcgctatcattaccgggcgaaaggctaaactggtagaagatcgttgtgccacattggggatcactcacttgtatcaggggcagagtaacaaactgatcgcctttagcgatctgctggaaaaactggcgattgccccggaaaatgtggcttatgtcggcgatgatctcatcgactggccggtaatggaaaaagtgggtttaagcgtcgccgtggccgatgcgcatccactgttgatcccgcgcgccgattacgtgacgcgcattgctggcggtcgtggcgcagtgcgcgaagtttgcgacttattactcctggcgcagggcaaactggatgaagccaaagggcaaagcatatgagtaaagccagacgttgggttatcattgtgctaagtctggcggttctggtgatgatcggcattaatatggccgaaaaagacgataccgcccaggtggtcgtcaacaacaatgatcccacctataaaagcgagcatacggacacgctcgtctataacccagaaggggcactaagctatcgattgattgctcaacacgttgaatattattccgatcaggccgttagctggtttacgcagccggtacttaccacgtttgataaggataaaatcccgacatggtccgtaaaagcagataaagccaagctgaccaatgaccggatgctctatttatatggacacgttgaagtcaacgcacttgtgccagactctcaacttcgcagaatcacgacggataacgcgcagatcaatctggtgacgcaggatgttacctctgaagacctcgtcacgttatacggaacaacatttaactccagcggtctgaaaatgcgcggcaacttacgcagcaagaacgccgagctgattgaaaaggttagaacatcctatgaaattcaaaacaaacaaactcagccttaatcttgtgcttgccagcagtcttctggccgccagcattccggcatttgccgtaaccggagacactgatcagccgatccacattgaaagcgaccagcaatctcttgatatgcaaggcaacgtggttacctttaccggtaatgtcatcgtcacccagggcaccatcaaaattaatgccgacaaagtggtcgttacccgtccgggcggcgaacaaggtaaagaagtgattgacggctacggtaaaccggcaacgttctaccagatgcaggacaacggtaaacccgttgaaggtcacgcttcccagatgcactacgaactggcaaaagattttgtcgttctgacgggtaatgcttatctgcagcaggtcgatagcaacattaagggcgataagatcacttacctggtgaaagagcagaaaatgcaggctttcagcgacaaaggcaagcgcgtaacaaccgttctggtgccgagccagctgcaggacaaaaacaacaaaggccagaccccggcacagaagaagggtaattaattcgttatggcaacattaactgcaaagaaccttgcaaaagcctataaaggccgtcgcgtggtagaagacgtcagcctgaccgtcaactccggggaaattgtcggtctgctggggccaaacggtgccggtaagaccaccactttctacatggttgtaggcattgtgccgcgcgatgcgggcaacatcattattgatgatgacgatatcagtctgctgcctctgcatgcacgcgcgcgccgcggtatcggctatctgccacaggaagcctccattttccgtcgcctcagcgtttacgataacctgatggcggtactgcaaattcgtgacgacttgtctgctgaacaacgtgaagaccgcgcgaacgagctgatggaagagtttcacattgagcacctgcgtgacagcatggggcagagtctctccgggggtgaacgtcgccgtgtagaaattgcccgcgcactggctgcgaatccgaaatttattctgctcgacgaaccgtttgccggggttgacccgatcagcgttatcgacattaaacgcatcattgagcacctgcgcgacagcggcctgggcgtgctgatcactgaccacaacgtgcgtgaaacactggcggtttgtgaacgcgcttatatcgtcagtcaggggcatttgatcgcccacggcacgcctacagaaatcttacaagacgaacacgttaagcgtgtataccttggggaagacttcagactctgatagggtagaagtttgcgacgttttagcaggagagtacgattctgaacatgaagcaaggtttgcaactcaggcttagccaacaactggcgatgacgccacagctccaacaggcaattcgtctgttgcagttgagcacgctggaacttcagcaggagctacagcaggcgctggagagtaatccgctgcttgagcaaatcgacactcatgaagaaatcgacacccgcgaaacgcaagacagtgaaacgctggacaccgccgacgcgctcgaacaaaaagagatgccggaagagctgccgctcgatgccagttgggacaccatttacaccgctggtacaccatccggcaccagcggtgactacattgacgacgagctgccggtctaccagggcgaaacgacgcagaccttgcaggattacctgatgtggcaggttgagctgacaccgttttccgacactgaccgcgctattgctacctctatcgtcgatgccgttgatgaaaccggttatctgactgtcccgctggaagatattctcgaaagtataggcgatgaagagatcgacatcgacgaagttgaagccgtccttaagcggatccaacggtttgatccggtcggtgtggcggcaaaagatctgcgtgactgtctgctgatccaactctcccaattcgataagaccacgccgtggctggaagaggccagactgatcattagcgatcatctcgatctgttagccaatcacgacttccgcactttaatgcgcgtcacgcgtctgaaagaagatgtgctgaaagaagccgtcaatctgatccagagcctcgatccgcgccccgggcagagcatccagactggcgaacctgagtatgtcattccagatgtgctggtgcgtaagcataacggtcactggacggtagaactcaacagtgacagcattccgcgtctgcaaatcaaccagcactacgccagcatgtgcaataacgcgcgcaacgatggtgacagccagtttatccgcagcaatctgcaggatgccaaatggttgatcaagagtctggaaagccgtaacgatacgctactgcgcgtgagtcgctgtatcgttgaacagcagcaagccttctttgagcaaggtgaagaatatatgaaaccgatggtactggccgatatcgcccaggctgtcgaaatgcatgaaagcacgatatctcgcgtgaccacgcaaaaatacctgcatagtccacgaggcatttttgaactgaagtatttcttttccagtcacgtcaataccgagggcggcggcgaagcttcctccacggcgattcgtgcgctggtgaagaaattaatcgcggcggaaaacccagcgaaaccgttgagcgacagcaagttaacctctttgctgagcgaacaaggtatcatggtggcacgccgcactgttgcgaagtaccgagagtctttatccattccgccgagtaaccagcgtaaacaactcgtttgacccaaccgataaggaagacactatgcagctcaacattaccggaaataacgtcgagatcaccgaggcactgcgcgaatttgttacagccaaatttgccaaacttgagcaatattttgaccgaatcaaccaggtctatgttgttctgaaagtggagaaagtcacccacaccagtgatgcaacactgcatgtaaacggtggtgaaattcatgccagcgcggaaggtcaggacatgtacgctgccattgatggcttaattgataagctggcacgccagttgaccaaacataaagataaactgaaacaacactaattgtccgggcaattagcatgtgcatggcggtctgttgtgcggcacaacgggccatttgtacggttaatgctccgagcctgttccactgtttgagtgggcaggttcttaggtgaaattatgacaaataatgatacaactctacagcttagcagtgttcttaacagggaatgtacgcgaagccgcgtccactgtcagagcaaaaaacgcgccctggaaatcatcagcgagctggcggcgaaacaacttagcctgccgcctcaggtggtttttgaagctatcctgacgcgggaaaaaatgggcagtaccggtatcggcaatggtattgccattccgcatggcaaactggaagaagatactctgcgcgccgttggcgttttcgttcagctcgaaacgcctatagctttcgatgccatcgacaaccaaccggtggacttactttttgccctgctggtgccggcagaccaaactaaaacgcacctgcatactctgagcctggtggcgaaacgtctggcggacaaaaccatctgccgccgtttacgcgcagcccagagcgatgaagagctgtatcaaatcattacggataccgaaggtactccggatgaagcgtaattattcggtaatgtctcttttagacgttgtgaggagaaacagtacatggtactgatgatcgtcagcggacgtagtggtagtggtaaatctgtcgccctgcgtgcgctggaagatatgggtttttactgcgtggataaccttcccgtagtgttgttacccgatctggctcgaaccctggccgatcgcgagatttctgccgccgtcagcattgatgttcgtaatatgccggagagtccagaaatattcgaacaggcgatgagtaacctgcctgacgctttcagtccgcaactcctgttcctggatgccgaccgtaataccttaattcgtcgttacagtgacacgcgccgactgcatccgctttccagcaaaaacctgagcctggaaagtgctatcgacaaagaaagcgatttgctggagcctctgcgtagccgagcggatctgattgtcgataccagtgaaatgtccgttcacgagctggctgaaatgctgcgtacccgtctgctgggtaaacgtgaacgcgaactgaccatggtctttgagtctttcggcttcaaacacggtatccctatcgatgcagattacgtctttgacgtgcgcttcttgccgaacccgcactgggatccgaaactgcgtccaatgacaggtcttgataaacctgtcgccgcgttcctcgaccgccacacagaagtacacaattttatctaccagacgcgaagctatcttgagctatggttacctatgctggaaaccaacaaccgtagctacttgacggtcgccattggttgtaccggcgggaagcaccgtagcgtgtatattgcagagcaactggcagactacttccgcagccgcggtaaaaacgtccagagtcgccatcgtacgctggaaaaacgtaaaccatgaccgtcaagcaaactgttgaaatcacaaacaagctgggcatgcatgcccggcctgcaatgaagctgtttgaattaatgcagggttttgacgctgaagtgctcttacgtaatgacgaaggcaccgaggctgaagccaacagcgttattgcgctgctgatgttggattctgccaaaggacggcagattgaagttgaagcgaccggtccacaggaagaggaagcactggccgccgttatcgccctctttaattctggttttgatgaagattaatcttcatcactttgacatacaactcccttcaaactccccccgacaataagaaaatcacgtactgaaatcgttctcaatcaacgtcatttgtacattttgtgcgcttttcactttcagaagaaccttaagaaaaccttaagaggcattgtttaggttttgtttaagttaatcgaccatactggagatcgtcagaaaatatttccaggagatggcatgattcgcttatctgaacaaagtcccctgggcaccggaagacatcggaaatgttatgcgcatccggaagatgcccaacgctgtatcaagattgtctaccatcgtggcgatggtggcgataaagagatccgccgtgagttaaagtactacgcgcatcttggtcgccggttaaaagactggagtggaataccgcgctatcacggtaccgttgagacggattgcggaaccggttatgtctacgatgtgattgcagattttgacggcaagccttccattacgctgaccgaatttgctgaacaatgccgttacgaagaagacattgcacaactgcgccagctactgaaacagctgaagcgttatttgcaggataaccgtatcgtgacgatgagcctgaagccgcagaatatcctctgtcaccgcatcagtgagagtgaggttatcccggtcgtctgcgacaacattggtgaaagcacattgattccactggcgacctggagcaagtggtgttgtctgcgtaagcaagagcggttatggaaacgatttatcgcccaaccggcgctggctattgccctgcagaaagatctgcaacctcgtgagagcaaaacgctggccctcactagccgcgaagcttaatccagctggtgttgttgcataaacggctcaccgcctaactgatacatctgccgtaaaatccacgcctgacggctacgcacgtagccgcttgggctggagactttgaaacgaagtggattaggtaatacagctgccagtaatgcagcttcgctccgggtaagtttgctcgcgggtttgtggaaataacgttgtgccgcagcttcgacgccaaacacaccgtcgccaaattcggcgatattcaggtaaaccgtcaggatacgctttttgctccagaccgtttctatccccagcgttaatccggcttccagcccttttcgaacccagctacgcccatcccataaaaagagatttttggctgtctgttgagaaatcgtactagcaccgcgaatacggttttcattgcgctcgttgtgcgccagggctttctcaatggaagcgacatcaaagccccagtgctcaggaaatttctgatcttctgcggcaatcaccgccagtcccatccacgggctgatttgatccatactgacccagtcagaatgtgccacgtaacgaaaattgccatgcagccaggcgctgacctgtcgctcgaccattaccgcactgaagggaacaggcgcaacgctaaacaacgcgatgcccccgccccagaaaacggcgaggacaaccattaaccgcaaaagaaaacggcgaacgaaactaaacaccgttaagcggcttttactcattcagccagaaccagcacgcgggaaaccagcttatcaatgccgctcgccgcttctgcaatgttctgcgccagcatatatgctggggtggtgacaatcttattgtcttcatcaaccacgatatcatcgacaggacacggcacatgctccgcgcccatctcttccagcacttctgcggtatcgatatcagtaccgatggtcaaacgcagcgggaaatcgaaaattttcggcagcatcgccggggcaatacacataaaaccaagcggttttccggcctgatgcatcgcttgtgccagcgcctttaattcacggtcaacggtgcattcgctaccaagactggcaaaattgcttaaattcttcgccgcgccaaaccccccccggcacaatcaacgcatccagttcagcggcatcggcctgggccagaggacggatttcaccgcgcgttattcgtgccgcttcaatcagcacattgcgcgtttccgtcatcgcttcgccagttaaatggttgataacatcaacctgctgcttatccggtgcaaagcagaccgcctgcgcaccgctgcgactaatagctaacaacgtcaacaccgcttcatgaatttcagaaccgtcatagacgccgcatccgctcagaattacgccaattttcttcattgtgatcatcctttcgcaattgactgaaacacattaatttttttaataaaaatggtacgcatcacacatttaactgattcatgtaacaaatcatttaagttttgctatcttaactgcgtgcggcctgaaaaacagtgctgtgcccttgtaactcatcataataatttacggcgcagccaagatttccctggtgttggcgcagtattcgcgcaccccggtctagccggggtcattttttagtggcttttgccacccacgctttcagcacttctacgtcgtgacgccactcttctttcatctcttcaatccattcaccgacgttatcttcccaggccggaaggtcaggagactgaatttgctgacccagctgttgcagatggcgtaaccccacactccccgccgcacctttaattttatgtccttcctcaacaatgccttttttatcctgcgccgtcagattgctctccagcacgctgacatagcccggcatcatcttctcaaacaccgctaacccgtcggtgatcagcttcggtcctacaagttcgagatactgttccagcatgggaatatcgagcaatgcttcacttttactgttctcttctgtcgtcaccgtactctcctcatcatcctgggtatcccagaatttcttgatcatcgcggttagcgccggaacagaaagcggcttactcagcacatcatccattccagcattgaggtactcttgtttgtctttcagcacgttagcggttaaggccaccagcggcggtaaatcctcgcgcggataacgtttcgtcagttcacgagagatatccagcccggtcatatctggcaactgaatatccagcaacaccaggtcgtattcgcccggtttaaacatctccagcgccgccttgccggtcatggcgacatcaacgctgttacctaatttttccagcacagaacgcgcaacaatcacgttcagttcaatgtcttccaccagcagcacattcagcgccggtaaaggcatatcgtcttcatcaaacgcatcatcgacctcttctgctacgctcggtgcgtggatcgtcaacgtaaaggtactacctttgccctgttcgctggtaaccgtaatatcgccgcccatatttttcgccagacgacgagaaacggccagaccaataccggtgccggtggcaggtttaccgccatgactgtctttcacctggtaatacatggcgaaaattttatccagctcatcctgcggaatgccgataccagagtcttccacttcaaaatgcagcatatcgccttcatcgtagcgcacgcgcacggtaacctggccttgctgggtgaatttgacggcgttactgatgaggttccacaggatctgccgtaaacgcgtcccgtcggtaatgacctgatgcggtaatggcagcgtcggctccaggttaaagcgcaatcctttttgttgcgcctgcaatgcggagagattttccagatcggcaaggaagctggtgaaatcaaccggttgattatcaagctggaccttgcgccgttccatcttatccatgtcgataatatcgttaaagatattccccagcgtgacggcgctaacatggatggtcttgagatatttttcctgctcggcggtgagttcggtatccagcagaatgcggctcagaccgacgataccgttcagcggtgtacgcaattcgtgactgatggtggagataaacgtcgttttgtcgcggctggcccgttcaagcgcatcctgataccgcttacgctcggtaatgtcgcgaccaaagcccatcaaaccgtgacgtttacccacgcggtcgtagtacggcactttacggatttcaaagcaggctttgcgcccgtccgggtaatccagccactgttcataggtcagactcacattatgacggaacactttttcatcggtttcaatgacttttgcggcggcttccggactgtaaacatcagcaggtttcaggtgaaccagttgtttttcgctttttccggtcagcagctccatcgcgcggttacagccggaaaactctttatcttcgttacgataaaaaaccaggtcgggactagcatcaaggaaggaacgtaagaaactggattgctgctcgagctgaatttgtgtctcttcgcgctctttgatttcaattttcagttggccgaaggtttcctgcagttctgcttccgctttttcacgaacggcaatttcctgatttagctgggcaatattatcttttaactgaacgttgaggctcaaatcgcgctcgcgcatctcctccagtttttgcaccagccgactcagacgttgtcgactctcctccagttgctcgacgaccacgcttagaaagtagaccgcccacggcgtaatcagcaaaccaaagaagatagaacgaataacatcaatgctttcgacctgaccatgcagcaccatggttaccgccatttgtaccacaatggcaagaacgacgagggccagcgccagcaacatactgaagcgcaccagacctaacttcatcatcaggtcaacataatactgcgccagcagacgaatttgcttcattagggaattccttcacgacaacctgccccaataatacccaattctgacagttacgttataaattgtgtgagaaatgcggaattcccctcaacgacttactccgttggaggtagccacggacgtcccagcgcgcttccctgtacgccatgttcattcagatagcgatccagctcgaccattcccgtccatcgattttcgcaccacagcggagcaagcagcgtcgggcgacgggcgctggcggaaatgcggtggtagatcacttccggtggcgtatggcgaatcatttctccggcagtgagcgtgtaatcctccagttcaataccgttcaaacgccccgcttcccaggctttcgccataatgctgcctttcacaatatgcagcggatgcagctttatgccgtccacgccggtttcaaccactcgctccagcgtttgcaaacattcagcctgcccttcgccaggcaggccgacaattaagtgggaacacaccttcagcccgcgctgacgtgccagctgggttgtacgctgataacaggcaaaatcatggccgcggttgatgcgatgcagtgttttgtcgtgggcggtttgtagccccagctccagccacacttcgtaaccctggtccttatattcgcaaagcagatccagcaccgcatccggcacgcagtccgggcgggtacccacacacaaaccgacaatattggcctggctcaccgcctgctgatacatagaacgcagcacctgaacttccgcaaaggtgctggtatacgcctgaaagtaggccagatagcgtttagcgcggttaactaaattcgcctggtgcgccagttgctcggcaatggaacgatgctgctgcgcttcatcggcaaagctggcaacattacagaatgtgcagccaccacgcccgatggtaccgtcacggttagggcagctaaaaccgccgtgcagcgtcagcttatgcaccttttgcccataacgacgggtgagatcaccaccaaacatattgactaatttctgtaactgcataatctgatagaccgcgccttgaaaagaggccaaagcctgccatttttagctcaattcggcgatgacctggatcaatcgtcccggcctgcttttatcaactgcataatcaatcaaaattaccgaaatttcatgcataatcacataaatcacttttgcttatcttgtgtcagatttttttatctcctgatggattttaggcaaaaacagtagcatgaaacgtcattaccaattaaggcagtataaaatgctggttttgtcgtcagttcaaggcaggataagggttaacacacctttatgacagtcaggaattgactgtttctctaacgacttcccttttagccttaaagataaaatccattttaatttcagtcatttaataaagaattttgcgctaaagcacatttctgtaccaataagcttgccatttgacctgtatcagctttcccgataagttggaaatccgctggaagctttctggatgagcagcctgctcatcatatttatgcagtaattgagatcccctcttcaccgtattaaccgatgcgaaaaggacaacaagggggcgaatgcgaggcgcgcgtatgacacgcaaaccccgtcgccacgctctttctgtgcccgtgcgcagcggtagcgaagtggggttcccgcagagcctgggggaggttcacgatatgttgtacgataaatcccttgagagggataactgtggtttcggcctgatcgcccacatagaaggcgaacctagccacaaggtagtgcgtactgcaatacacgcactggcccgcatgcagcaccgtggcgcgattctcgccgatggtaaaaccggcgacggttgcggcttgctgttacaaaaaccggatcgcttttttcgcatcgttgcgcaggagcgcggctggcgtttagcaaaaaactacgctgtcgggatgctcttcctgaataaagatcctgaactcgccgctgccgcacgccgcatcgttgaagaagaactgcaacgcgaaaccttgagcattgtgggctggcgtgatgtccccactaacgaaggcgtgctgggtgaaatcgccctctcctctctgccacgcattgagcaaatttttgtgaacgccccggcaggctggcgtccacgcgatatggagcgccgtctgtttatcgcccgccgccgcattgaaaagcgtctcgaagccgacaaagacttctacgtctgtagcctgagcaatctggtgaacatctataaaggtctgtgtatgccgacggatctgccgcgcttttatctggatcttgcggacctgcgtctggaaagcgccatttgcctgttccaccagcgcttctccactaacaccgtaccgcgctggccgctggcgcaaccgttccgctatctggcgcataacggtgaaatcaacaccatcaccggtaaccgccaatgggcgcgtgcgcgtacttataaattccagacaccgcttatccctgacctgcacgacgccgcaccgttcgtcaacgaaaccggctctgactccagtagcatggataacatgctggaactgctgctggcaggcgggatggatatcatccgcgccatgcgtctattagtaccacccgcctggcagaacaacccggatatggacccggaactgcgtgccttctttgactttaactccatgcatatggagccgtgggatggcccggcgggcatcgtgatgtccgacggtcgttttgccgcctgtaacctcgaccgtaacggtctgcgtccggcgcgctacgtcatcaccaaagataagctcatcacctgcgcctctgaagtcggtatctgggattaccagcctgacgaagtggtcgaaaaaggccgcgtcgggccaggcgaactgatggttatcgacacccgcagtgggcgtattctgcacagcgcagaaaccgatgacgatctgaaaagccgccatccatataaagagtggatggagaaaaacgtccgccgactggtaccgtttgaagatctgcccgatgaagaagtgggtagccgcgaactggacgacgacacgcttgccagctaccagaaacagtttaactacagcgcggaagagctggactccgtaattcgcgtactgggcgaaaacggtcaggaagcggtcggtagcatgggcgatgataccccattcgccgtgctctccagtcagccgcgcattatttacgactacttccgccagcagtttgcccaggtgactaacccgccaatcgacccgctgcgtgaagcgcatgttatgagcctcgccaccagtatcggtcgtgaaatgaacgtcttttgcgaagcagagggccaggcgcaccgtttaagctttaaaagcccgattctgctctactccgatttcaaacagctcacgacgatgaaagaggagcactaccgcgcagatacgctggatatcacctttgacgtcactaaaaccacgctcgaagcgacagtcaaagagctgtgcgacaaagccgaaaaaatggtacgtagcggcaccgtgctgctggtgctctccgaccggaatatcgctaaagatcgcctgccggttccagccccgatggcggttggcgcgatccagacccgtctggtcgatcaaagcctgcgttgcgatgccaacatcatcgtcgaaaccgccagcgcccgcgatccgcaccacttcgccgtgttgctgggcttcggcgcgacggctatttatccataccttgcctatgaaacgctgggccgcctggtagacacccatgcgattgccaaagattatcgtaccgtgatgctcaactaccgtaacggcatcaacaaaggcttgtacaaaatcatgtccaaaatgggcatctccaccatcgcctcttaccgctgcagcaaactgtttgaagcggtcggtctacacgatgatgtagtgggcctgtgcttccagggggcggtcagccgcattggtggagcaagctttgaagacttccagcaggatctgctgaatctgagcaaacgtgcctggctggcgcgtaagcccatcagccagggcggtctgctgaaatacgtccacggcggcgaataccacgcctacaacccggacgtggtgcgcacgctgcaacaagcggtacaaagcggcgagtacagcgactatcaggaatacgcgaagctggttaatgagcgtccggcaaccacgctgcgcgatctgctggcaattacgccgggtgaaaacgcggtcaacattgctgatgttgaaccggcaagcgaactgtttaaacgctttgataccgccgcgatgtctatcggcgcgttaagcccggaagcccacgaggcgctggcggaagcgatgaacagcatcggcggtaatagcaactccggtgaaggcggcgaagacccggcgcgctacggcaccaacaaagtgagccgcatcaagcaggtggcttccggtcgctttggggttactccggcgtatctggtcaatgccgacgtcattcagattaaagtcgcccagggcgcgaagccaggcgaaggcggtcagttgccgggtgataaagtcacgccttacatcgccaaactgcgctatagcgtgcccggagtgacgctgatctccccgccgccgcaccacgatatctactctatcgaggacttagcgcagctcattttcgacctcaagcaggttaacccgaaagcgatgatctccgtgaagctggtttccgaaccgggagtaggcaccatcgcgactggcgtggcaaaagcttatgcggacttgatcaccatcgcaggctatgacggcggcaccggcgcaagtccgcttagtagcgtgaaatacgcaggctgtccgtgggagctggggcttgttgaaacccagcaggcgctggttgctaacggcttgcgtcacaagatccgtttgcaggtcgatggcggcctgaaaacgggtgtcgatatcatcaaggcggcgattctcggcgcagaaagcttcggcttcggcactggcccgatggtggcgctcggctgtaaatatctacgtatttgccatctgaacaactgcgcaacgggtgtagcaactcaggatgacaaactgcgtaagaaccactatcacggcctgccattcaaggtgacgaattactttgagtttatcgcccgtgaaacccgcgagctgatggcacagcttggcgtaacacgtctggtggatctgattggtcgcaccgacctgctgaaagagctggacggtttcaccgccaaacagcagaagctggcgctgagcaagctgctggagactgccgaaccgcatccaggtaaggcactctactgcaccgaaaacaacccgccgtttgataacggcctgctgaacgcgcagttgctgcaacaggcgaaaccgtttgtcgatgagcgccagagcaaaaccttctggttcgatattcgcaacaccgaccgttctgtcggcgcgagccttagtggctatatcgcccagacgcacggcgatcaggggctggcagccgatcctatcaaagcgtacttcaacggcaccgcaggccagagcttcggcgtgtggaacgcgggcggcgtggaactgtacctgaccggtgatgccaacgactatgtcggtaaaggcatggcgggcggcttaatcgccattcgtcctccggttggttccgccttccgcagccatgaagcaagcattatcggcaacacctgcctgtatggcgcgaccggtggtcgtctgtatgccgcaggccgcgcgggtgaacgtttcggcgtgcgtaactccggtgctatcaccgtggtagaaggcattggcgacaacggttgtgaatatatgacgggtggtatcgtctgcattctgggtaaaaccggcgttaacttcggtgcgggcatgaccggcggtttcgcttacgttctcgatgaaagcggcgatttccgcaaacgcgttaacccggaactggtcgaggtcttaagcgttgacgctctggcgatccatgaagagcatctgcgtggtcttatcaccgagcatgtgcagcataccggctctcagcgcggtgaagagattctggcgaactggagtaccttcgccactaaatttgcgctggttaaaccgaagtccagtgatgtaaaagcactgctgggtcaccgtagtcgtagcgcagctgagttgcgcgtgcaggcgcagtaaggggtagcaacaatgagtcagaatgtttatcaatttatcgacctgcagcgcgttgatccgccaaagaaaccgctgaagatccgcaaaattgagtttgttgaaatttacgagccgttttccgaaggccaggccaaagcgcaggctgaccgctgcctgagctgcggcaacccatactgcgagtggaaatgcccggtacacaactacatcccgaactggctgaagctcgccaacgaggggcgtatttttgaagcggcggaactgagccaccagaccaacaccctgccggaagtttgcggacgagtctgcccgcaagaccgtctgtgcgaaggttcctgcactctgaacgatgagtttggcgcggtgaccatcggcaacattgagcgctatatcaacgataaagcgttcgagatgggctggcgtccggatatgtctggtgtgaaacagaccggtaaaaaagtggcgattatcggcgcaggcccggcaggtctggcgtgtgcggatgtcctgacgcgtaacggcgtaaaagccgttgtcttcgaccgtcatccagaaattggcgggctgctgaccttcggtattccggccttcaagctggaaaaagaggtaatgacgcgtcgccgtgaaatcttcaccggcatgggtattgaattcaaactcaataccgaagtgggccgcgacgtacagctggacgatctgctgagtgattacgatgccgtgttccttggcgtcgggacttatcagagtatgcgcggcgggctggaaaacgaagacgccgatggcgtgtacgcagcgctgccgttcctcatcgccaacaccaaacagttaatgggctttggtgaaacccgcgacgaaccgttcgtcagcatggaaggcaaacgcgtggtggtccttggcggtggcgacactgcgatggactgcgtgcgtacgtccgtgcgccagggagcgaagcacgttacctgtgcctatcgtcgtgatgaagagaacatgccgggttcccgccgcgaagtgaaaaacgcgcgggaagaaggcgtagagttcaaattcaacgtccagccgctgggtattgaagtgaacggtaacggcaaagtcagcggcgtaaaaatggtgcgtaccgaaatgggcgaaccggacgccaaaggccgtcgccgcgcggagatcgttgcaggttccgaacatatcgttccggcagatgcggtgatcatggcgtttggtttccgtccacacaacatggaatggctggcaaaacacagcgtcgagctggatagtcaaggccgcatcatcgccccggaaggcagcgacaacgccttccagaccagcaacccgaaaatctttgctggcggcgatatcgtccgtggttccgatctggtggtgaccgctattgccgaaggtcgtaaggcggcagacggtattatgaactggctggaagtttaagcgaggtaacaatgaattcgccagactgtgtctggcgaatcaaattactgacgaagtgcgcgttgttttctggcaaatgcggcatgagcgtttgacctttcctataatagggataattttcaataaattgtgctttgttcaccaagtctgatgagtgaagcacatcaagcaatttctcatttacaatccgtctcaattacttgttaacacctctgacaataccgattctgcaagctattcagtcttttcattccatgtaaattgtctcgatattaatatacaaaatatgaatataaaaaaccaatatattatccttaattatctatatattttcctatttttcagcgcaaacattcatgtaatgaataattatcaccacaaaccacctcaccagcaccttattattcacatgatcgtaactataaaattcattaaataaatacaccccagcaagttggctatttctgaacgagttatttatttacattcacaaacagatatatatactgcttcagctttttattttaaaaaataaatttgttattaaggatatgttcatatgtttttcaaaaagaacctcacaacagctgctatttgtgcagcactttctgttgcagcattcagtgccatggcaacagatagtactgatacagaattaactatcatcggcgagtatacccctggtgcatgtaccccagttgttacgggcggcggcattgttgactatgggaaacatcataacagtgcgctgaatccgaccggtaaaagtaataaactggttcaactgggccgcaaaaacagcacattaaatataacctgcacagcaccaacgctaattgctgtaacctccaaggataaccgtcagagcaccattgtagcgttaaacgacacatcctatattgaaaaagcttatgatactctcgtagatatgaagggaacgaaaaacgcctttggtttaggttctgcgcctaatggacaaaaaattggcgctgcatccattggtattgacaggtctaatggtgggattcacgcggcggacgatacaggtgaaattcctgtcgacctgattcaaactgaccactggagtgcagcgacccccacatggaaagccagttctaatggcgcattctgcagcctgacaagttgcagtgcaatcgagcgcggttattctgttgcaaaaacaggggaactgacacctgttgctattacagcggtcaccttcccgttactgattgatgctgcggtaaatgacaatactattcttggttctgatgaaacgatcaaactggatggtaacgtcactatcagcgttcagtatttataagaacttgtaatacagtttttatttttacgcattaaccagttagctataactcggacagattatgccctatgacatggtctgtcttaatcaatctcatcgcaaacagtgcataacatatattaacaatatgtttctgcgttatttatcattattacaggagttttaatttaaatgctcagacacattacattcactgtatttataacaacatcaatgaatactaacaatgccggacaggagtactatcaggcattcgttttatacgatcggttaatgtttcaggaaagctcttcgcatatcttggggaaagtaaatgtaatacgctgttcttaattgttcagtgctcaccccccagagtatagctcattccattattcaacttagctccatataaagggacagataatggaaagcctcagtgaaggaaccacagcaggctaccagcaaatccacgacggtattattcatctggtcgatagcgcccggacggaaacggtacgtagcgttaacgcgttaatgaccgcgacgtaccaggaaattggccgacgaattgtcgaatttgaacaaggtggcgaggccagggctgcgtatggtgcgcagctaatcaagcgactaagtaaggatttatgtctaaggtataagcgtgggttctctgcaaaaaacttacgccaaatgaggcttttttacctcttttttcaacatgttgaaattcaccagacaatgtctggcgaattaacaccattgggaattccgcagacaccgtctgcagaattcccaagcgcaaagatttggcagacgctgtctgccaaatctttccccttgcccaggtccacctacgtccgtttactttccgttaaaaacgctgacgcccgcagcttttatgaaaaagagacgctccgctgtggctggtctgttcgccagctagagcggcaaattgcgacccagttttatgagcggacactactgagtcatgacaaaagtgccatgctgcaacaacacgctcctgccgagacgcatattcttccgcaacaggcgatacgcgatccctttgtgctcgaatttctggaattgaaagatgaatatagtgaatccgattttgaggaggcgctgatcaaccacctgatggatttcatgctggaacttggggatgattttgcctttgttggtcggcagcgaaggttacgcattgatgacaactggtttcgtgtcgatctgctgtttttccaccgccgtttacgctgcctgctaatcgtcgatctaaaagtgggcaaattcagctatagcgatgccggacagatgaatatgtatctcaactacgccaaagagcactggacgctaccggatgaaaatccgcccatcggtctggttctctgtgcagagaaaggagccggagaagcgcattatgctctggcaggtttgcctaacaccgttctggcaagcgaatataagatgcaactacctgatgagaaacgactcgcagatgaactcgttcgaacacaggcggtgctagaggaaggctatagacgccgttaatttcagcggtttcgaattctgcagacagtgtctgcagaatctttaaaacgaactaagttttaagccattaaatcagccttaaccttcaccacaacctttttaatctctccaggctcgccgacaacgcatcctggtttatgcggttcacctggcataaacacggcgaacattcccggttttaagatgatggcttgctcgttatcaatggtgctgcaaagctgataatcatcctcatggtggaactcttcacactgacgcgcagtgcctgccatgccaaacagaatccgttcctcaccgtttaataacagctggatatcaatgtattgctcgtgcaattccgcttttttctcgacggggctttgagtgttaaacgtcatgacattcataaagatattgtcgccctgtaattcgtaacgacccggcgctttttcttgcggtctggcagctaatgccagcgttaacgcgtcctgtaacgcaggatgtaacccagcagacggtaaactctgtacttcacccatcatcataatttttctccctgggccaacagcgtagccccaagtaaacctgcatcatggcggtaatgcgccgccagtaaatcaacatgaaatgccgctggctcctgcgccagatacgtttccaccagcgccagatacccttctgccagaccaacgctgccaccgaccaccacgcactggcaatcagttgtggctttaatatcagcgatcagccttgcaagcgtacgtgcggagcggtgaatcagctgctgcgcctgctcgtcaccctgcccggcgcgcgtgaaaatagttttcgcatccgcgccagccaactccccctgcgctgccgctgcaatgccgcgaccagaagcaatcgcttccacgcaacctgtgcgtccacagccgcagactgggccgtgtggatcggcaagcgtatgcccgatatgccccgccagaccgccagggccggtaagcagtttgcagccgctcactacaccgccgccaacgccggtggaaacggtgataaagaccatatcggttatatcgccatccagcgcctgaaactccgcccatgctgcggcctgcgcgtcgttaatggcaatggtcggcaaattggtaagttgttccagcgttttgactaacggaaagtgtagcaatccaccaagattatgcggattaagtgccagcaagctgccgtcacggattatcccggtgctagcgatggcaacccgctgcgcatgagcttgcaacggagagactaatgcggataaggcatcacgcaaggcttctggtgtctggctggctggcgtaggaagttcacgacgatcgcggatctgcccgtcagcgccaatcagcgcggcggcaagtttagtaccgccgatatcaatcgccagtgtggtcatagcaccgcctttttcatcgctgtgttgtaccactgacaaatgtgctcaagacgcgtgattgcagaaccgaccgtcaccgcccacgcgccgtggcgcatcgcatccgccgcctgagcaggcgtgttgtaacgcccttcggcaatcacccgacatccggcgtcgctcaacgttttcaccagcgccagatccggctcttctggcgtttcaggcgtggtatagccagaaagcgtagtgccaataatttcggctcccagcttttggcatgccaggccgtcttccggcgtactgcagtcggtcatcgccagtaaaccgtgatggtgaatacgtgccagcagcgtttcaacaggcaccggacgcgggcggtcggtgccgtcaatggcgataatgtccgcgcccgcctgcgccagcgcatcaacatcttcaatataggccgtgatgcgtaccggagaatcctccagatcgcgtttcacaattccaataatcggcacgctcaccaccgcacgcgtggcttgcagatttgccacaccttcaatgcgaatggcaaccgcgcccgcctgttctgccgctaatgccatggcggcgacgatttcgggtttatcgagcgggctgtccggaaccggctggcaggagacaatcaggccaccgttagcagcgattttttgatccagttgtgcaagtaagctcatacatcttcccttagcgaaaggcccggtacatagaccgggcaacaggattaacttttggttttgactaaatcgtttttggcgctgccaaacggcacggcaccgctgaatggtttaccgtcgatagcgtcatgagtacgcaacgcttccgggcgcaaccaacgctgaacgcgagaaggcatatccagcccaatcagcaggatcaccacgaacgtcagactgaagctgaggcttgccagcgcagtacccagatccagacgttgagcgatcaacgcgccgatgattggggccagtgcaccgcccaatgcgccaacgttgtaggtaaagcccaggcccgctgcacgctggtcggtatcgaaataaccgccaatcagttttggtaagatcccggcgatcccttgtccaagcatttgctggaagaacagtaacagaccgagcacccagacgtttgcgccgccaatcgcaaataccggaataatcagcagctggctggccagcaggctacaaacgtacgctttgcgggttcccagccagtcaccgaggaagccacctacgcagcatcccaccgccgcgccaaagccactaaagaacagcacattggctacagtatgcgggttataagccagatcggttttcagatacgttggcagcagcgcctgaatcggccaactgtagaggaaagcaaacaacacgaccaccatcagcattacgcccgttggccagcgtttgcctgcactctgcaccataaagctgataaagattgcggcgcataacagcccaagaacagcgacgatcgcggcattttgcaggttaccggcgaagcagaaccacagcgcagtagccgccgccagtgtcattacgatattggcaatgcgatgttcaccacggtagagaatatccaccattgtgcgtactggtgctttacctgcgtgtttctctttccagtcttccgcttccgggatgtttttacgcagccagagagcaaagatgattggcaaaatgccgataaagaacagcgcacgccagccccagaccggaaccaccaggctatagacctgagcggcaacgacggcccccacagagaagccactaatcaaaaaaccactggctttgttacgcagatgttttggccagctttcaatgacataggtggcgctggaaccgtattcacccgccatccccatgccgatgaccagacgagcgataaacatggtgatgtagcctggcgcaaagccgcaggccagcgtcccggcgctgaagagaacgatgctggtgaccattgccagacgacgcccgtagcggtcacccatagcgccgagcatcaggccgccgaaccagcgagagataaaggctgcagagatcagacttgccgcctgcaccgtcgtcagcccgaattcaccttgtacttcggtgagtaccagggcgattaaaacgaaatcaaaaccgtcaagcagatatcccaaccaggcagcggaaaatgcgcgccattgtgcacggttgagatggcgataccacgggatattctgggttgtagtactcattgtgagtctcccgcggtgggcgatgcccacacgctttggtatgaaaattgtagggtacagatgcgtttatttcccctcacccggtaggggcgagcgaggggaaacaactcacccgcgctcttgcatcaactgctgggccagcgccttcagttctggcagatatttttcatctaccggtccaaacggtttgcggcacagcggcacagaaacgacatccatataatggaggacagttttcaggccgcggaatacgcccgttttgatcagtaaatcaatgactttattgcattcagtttgcagtttctgcgcggtctggatatcgccttctttcagcgccttaacgatcccctgatagcgccagcccatgatgttgtaggtactgccgataccaccatcagcgcccgccagcagaccagaggcgaagatttcgtcgtaaccgttatagagcacaagatcaggatgttcacgacggatctgctccatctgatagagatcgccagaggtctgtttcagcgcacctacgccaggcaatgtaacaagtgtgttgatctgatccagggtcagttttaccccactcagggctggaatgttgtacaccaccatcggcaaaccatccgcgctatcaataattgcccgatagtgatcgcagtgttcttcaaagctgaaaggatagtagaacggcgtgacggcggagacggcatcgaagccataacgtttagcgcttgccgcaagttgttggctttcggcggtgctgacgcaaccgacgtgggcgatgagtttaatcttacctttcgcctcttcggcgacgatttccagtacctgttcacgctcggaaaggctttgtacaaaggcctcgccggtgctaccacccacgtataaaccgtcgatgccctgctgaatattgaactgaaccaggcgacgcagactcgctttatccagtgcttgttgttggtcaaaaggagtcaggagtgcagccattacgccacgtaaattcgttgccataaatacctctgaagtgatgcttgtctgataaacgatatacctttatacctgttataccagatcaattaagcaacaccccatacagaaagcttataatgcgatctgcttcactaaagtggcattatttctttttgttggtggtctgaccgaaagcgtgccaggtagcagagacgctgttgagatggctttgcaacgcacgatcggcttcgtcaggatcatgacggcggatcgcatcaacgatcgcaatatgctgttgataactaacgttgttatgttcgtgcagtgcctgatcggtaaccgttgggcgtgcggcaataagccagtcgagcagggcaacgtggatcgccatgaagattgggttaccggggatctccgccagcacgcggtggaaatcaacgtcactacgaatgaatgccgcgttgttatccaggctctgactgttgatttccagtgcttttgccagcaaatcgatttgctcatcggtggcatgttcagccgcatagcgcaccagactggattcaaagaacagacgtaattgttcgaaatgggcaatcccaccgggatgagaaaggaaatctttcgccatgccggaaagctcaccgatgatagtgtccgcagaaggacggctgacgcgagcgcgttcgccgttgtttatttgcaccagacctttgcgttttaacgctgccagcgcttcacgcacgctaggacgcccgacgttaaagaacgccatcagttcgcgttcagacggtaattgttcaccttcgccaaattcacgacggcggatcatctgttccagctcttcttccaccatttcggagagttttttacgcgccagcgggcggctacgcaagttgcgaccaattgcaggactagaatcttcggtttggctatcaaatgcgttcataaggcccattctgtaaggtcagtgtgattaacatcatcagtgacatcctatcacaggattgaaagtaggggaaaatggcagggttttctctttgtgcctcatcattaccataattaacggaataattaactattgcgaaaaattaatgtaacgcagataaaaacatcccgtttgaattatttataagactattcacgagcattatgaatattatgaatgtgttcttacaaaataatcataagcgcatattttttaatgaaaaatcacctcacctacaattaaaaacacgacatccgcaccataaatagccttgcaaaaaatataacatcgttgttttcaatctgccgtttatgggattgaccgttttcttttgacacggagttcaacaatgttcggcataattatatctgtcatcgtattaattacgatgggctatttgatcctgaaaaactacaaacctcaggtggtgctggctgccgcaggtatcttcctgatgatgtgcggtgtctggttagggttcggtggtgtactcgatcccaccaaaagcagcggctacttgatcgtcgatatttataatgaaatcctgcgcatgctgtccaaccgcattgccggattggggctgagcattatggcggtgggcggttatgcccgctacatggagcgcataggggccagtcgcgcgatggtgagcttgttaagccgcccgttaaaactcattcgcagcccgtatattattctgagcgcaacttacgtcatcggccaaatcatggcgcagtttattaccagcgcctccggtctgggtatgttgctgatggtcaccttatttccgacgctggtgagtctgggagtaagtcgtctctctgcggtggcagttatcgcaaccacgatgtccattgagtgggggattctggaaacgaactccatttttgctgcccaggtagcgggaatgaaaattgccacatacttcttccactaccagcttccggtcgcctcttgcgtcattatcagcgtggcgatctcccactttttcgtgcaacgcgcttttgacaaaaaagataaaaatatcaatcacgaacaggcagagcaaaaagctctcgataatgtcccgccgctctattacgccattttacctgtgatgccgttaatcctgatgctcggcagcctgttcctcgcccacgtcgggctgatgcagagtgaactgcatctggtggtggtgatgttactgagtttgactgtgacgatgtttgttgagttcttccgcaagcataacttgcgcgaaacaatggacgatgtgcaggcgttttttgacggcatgggtacgcagtttgccaacgtggtaacgctggtggtcgcgggtgaaatatttgcgaaaggcttaacgacgattggcactgtcgatgcggttatcaggggggcggagcattctggtctgggcggtattggcgtgatgattattatggcgctggtcattgccatttgtgccattgtgatgggctctggcaatgcgccgtttatgagttttgccagtcttattccgaatatcgcagccggactacatgtaccagcggttgtaatgattatgccgatgcattttgccacgacgctagcgcgcgcggttagcccgattactgcggtggtggtcgttacgagtggaattgcaggcgttagcccttttgcggtggtgaagcggacagcgatccccatggcagtcggtttcgtggtgaatatgattgccacaatcacgctattttattaagtcattaaaaagacaaaacaggccgcctgggcctgttttgtattacttcacaacgcgtaatgccggtcgaccaccgcgtggtggctgcggaggttcatcgtcaggatgagtgtcatcatcgtgatctggcttgtcgccatcaataacgctcataacggtttcgttgtctgcgcttgcctcttcatcattcatgatgctggtatcttcatcgtaggcagcttcaggctcaaacatcgtgcctgcgccattttcacgggcgtagatagccagcacggcagccagcggcacagaaacctgacgcggaatgccaccaaagcgcgcgttaaagcgcacctcatcattcgccagttccagattgccgacagcacgcggcgcaatgttgagtacgatttgcccgtcacgcgcatattccataggaacctgcacgccagggagcgtcacatccaccaccaggtgcggcgtgagctggttatccagcaaccactcatagaatgcacgcagcagatagggacgacgtggtgttagctgactcaaatccatacagattaactccggcccagacgcatttcacgttctgcttcagttaaagaagcaaggaaagagtcacgctcaaagacgcgggtcatatagcctttcagctctttcgcacccgggccgctgaactcgatgcccagttgcggcagacgccacagcagcggagcaagatagcaatcgaccaggctgaactcatcgctcaggaagtacggcttctgaccgaagaccggcgcaatcgccagcagttcttcgcgcagttgcttacgtgcggcatctgcttcagaagcactaccgttgatgatggtgttcatcagcgtgtaccagtctttttcgatgcgatgcatgtacagacggctttcaccgcgagctaccgggtaaacaggcatcagtggcggatgcgggaaacgctcatccagatattccataatgatgcgagattcccacagggtcagctcacgatccaccagggtcggaacgctctgattcgggttgaggtcaatcagatcctgaggcggattgtccttttccacgtgttcgatctcgaaacttacacctttctcagccagcacaatgcggacctgatggctatagatgtcagtaggaccggaaaacagcgtcattacgctacgtttgttggcagcgacagccatgaaaacctccaggtatagtcagaatttttactgctaccagccaccaggtggccagtcagaagttgtgttacccaataaggaacgactctctttgttcgaaaatcaaacaaaaaatgagcaatacccgacatttgggcagaaaattggatgatagtttaccagattttgcgaccattgtggtgagtcgatgccggaaatggggaaaaagagatgcgctttagtctgaaatagttgacttagtcccttattggcgatgtggtttttgttttacctgtctgtcaggtggcagcaaaaagcaactttccagtttttacgctgattcagattttagctataaaaaaacccgccgaagcgggttttttcgaaaattgttttctgccggagcagaagccaattaacgtttggagaactgcggacgacgacgtgctttacgcagaccgactttcttacgttcaacctgacgagcgtcacgagtaacgaagccagctttacgcagttcagaacgcagggactcgtcgtattccatcagagcgcgggtgataccgtgacggatcgcaccagcctgaccagagataccaccacctttaacggtgatgtacaggtccagtttctcaaccatgtcgaccagttccagcggctgacgaactaccatgcgggcagtttcacgaccgaagtactgttccagagaacgttggttgattacgattttaccgttgcccggtttgatgaaaacgcgagctgcggaacttttgcggcgaccagtgccgtagtattgattttcagccattgcctataatcccgattagatgtcaagaacttgcggttgctgtgccgcgtggttgtgctcgttacccgcgtaaactttcagtttacggaacatagcacgacccagcgggccttttggcaacatgcctttaaccgcgatttcaatcacacgctcaggacggcgagcaatcatctcttcaaaggtcgcttgtttgataccaccgatgtggccggtgtggtgatagtacactttgtcagtacgcttgttgccggttacagcaactttgtcagcgttcagaacgatgatgtaatcaccggtatctacgtgcggagtgtattccgctttgtgcttaccgcgcaggcgacgagccagttcagtagccagacggcccagagttttaccggtcgcgtcaacaacataccagtcgcgttttacggtttctggtttagctgtaaaagttttcattaaaagcttacccaataaatagttacacgttggtgaacacccaaacgtcttcaattgttgaggttcacacgacaaagtccggcaaacctaccccttcgaatagcctatgccagcacacaaaaagttttgggaaaaaaactttcttgtaacgtggggtcgcaggattatagagaagtcggggtcaaagatcgacccctttttgtgatttgtgacaggttttaacccgccaaatgctcgcgcttcagatactcttcgctttgcatctcttgcagacgactcaggcaacgctggaactcaaacttcagccgatcgccctgataaatttcatacagcggcacttctgcactcaccactaatttgacatggcgctcgtaaaactcatccaccagcgcaataaagcgccgcgcttcgctctccatcaaccgcgtcataactggtacatcaaacaacatgaccgtatgaaagagacgactgagcgcaatatagtcatgctgactgcgggcgtcgacgcacagcgtagtaaaagagaccgccagcgtctggttctcgacgcccattgttgctaatggccgatggttgatttctaacgtcggactattttctcgtttcccccccgccagcgccaaccatagtttatccatttgcgcccgggtttcatcgtgaagtgggctaagccacagatgcgcctgagtgagtgtacgcagacgataatcaacaccagcgtccacgttcattacatcacaatgctgtttaatggcatcgattgcaggcagaaaacgcgcacgttgcaggccatttcgataaagttcatccggcggaatattactcgtcgctaccagggtaataccgcgagcgaacagggctttcatcagaccgccaagtagcatggcatcggtaatatcagaaacaaaaaattcgtcaaaacagagcacgtcagtttcggctttaaagcgatcggcaataatttccagcggatcggtctgcccctgtaaggcagttagctcttcatgcacccgcagcataaaacggtgaaagtgcaggcgctgtttccgctctcccggcaggctttgatagaaaaggtccatcagccaggttttcccgcgtcctacaccgccccacatatataagccacgcactggcgtatgctttgtgtcttcgcgtttaccccacagcttaccgacccgcgccattagcccactcgtcctgggggctggtggcgtgctattgatgagttcctgataaataatttccaggcggctgacggcctctttttgaacgtcgtcgggttgatggctgccttcattaagcgccttcaggtattggcttgttggggtaacgctttgcatgatcttattgttattccttgaataatcggtgcgccgttgttcacggttgacgaaaaaaaggccgttctacactacgcgatatgcagtcgggattccacttctgtggaattaacggttatagtggcataatcagccgcaggcatggagcctgaagccaacaccctacggaaacaaaagacaacgggagatgttcatgacctgggaatatgcgctaattgggttagtcgtcggcatcattattggtgctgtggccatgcgttttggtaatcgtaaactacgccagcaacaggcgttgcagtacgaactggaaaagaataaagctgaactggacgagtatcgcgaagagctggttagccactttgcccgcagcgcggaattactggataccatggcgcacgactatcgccagctgtatcagcacatggcaaaaagctccagcagcctgctgccggaactgtctgctgaagcaaacccgttccgtaatcgtctggcagagtctgaagccagcaacgatcaggcaccggtgcagatgcctcgcgactattctgaaggcgcatccggcctgctgcgtactggcgcgaagcgcgactaatttatttttcgggcgcagccattgcgccctcctcttctctccctccccgactatcatttaatctggtgtctcattgttagccgtctgaaaattcaataacatcaaactgttttgaatctcttttcttatcattcaggtacgagagcaggaataatgaaaaaacaaacccagctgttgagtgcattagcgttaagtgtcgggttaactctcagcgcgagttttcaggccgtcgcgagcattccaggccaggttgccgatcaggcccctctccccagtctggctccaatgctggaaaaagtgcttccggcagtggtgagcgtacgggtggaaggaacggccagtcagggacagaaaatcccggaagaattcaaaaagttttttggtgatgatttaccggatcaacctgcacaacccttcgaaggtttaggctccggtgtcatcatcaacgccagtaaaggctatgtgctgaccaacaaccatgtgattaatcaggcacagaaaatcagtattcagctcaatgatgggcgcgagtttgatgcaaaactgattggtagcgatgaccagagcgatatcgccctgttacaaattcaaaacccgagcaaattaacgcaaatcgctattgccgactccgataaattgcgcgtcggtgattttgccgtagcggtcggtaacccatttggccttgggcaaaccgccacctctggcattgtttccgcattaggccgcagcgggttgaatcttgaaggtctggaaaactttatccagacagatgcttccattaaccgcggtaactccggcggtgcactattaaaccttaacggtgagttaattggcatcaacactgcaatccttgcgcctggcggcgggagcgtcgggattggatttgccatccccagtaatatggcgcgaacactggcgcagcagcttatcgactttggtgaaatcaaacgcggtttgttaggcatcaaaggcaccgagatgagtgccgatatcgccaaagccttcaaccttgacgtgcagcgtggcgcgtttgtcagcgaagtgttgccaggttctggcagcgcaaaagcgggcgtcaaagcgggcgatattattaccagcctcaacggcaaaccgctgaatagctttgctgagttgcgctctcgtatcgcgaccaccgagccgggcacgaaagtgaagcttggcctgctgcgtaacggcaaaccactggaagtagaagtgacgctcgataccagcacctctagcagcgccagcgctgaaatgatcacgccagcgctggaaggtgcaacgttgagcgatggtcagctaaaagatggcggcaaaggtattaaaatcgatgaagttgtcaaaggaagcccagctgctcaggctggcttgcaaaaagacgatgtgatcattggcgtcaaccgcgatcgggtgaacagcattgctgaaatgcgtaaagtgctggcggcaaaaccggccatcatcgccctgcaaattgtacgcggcaatgaaagcatctatctgctgatgcgttaatgtcgtaaaccgggcatcaggcttacgtgtgatgtccggttaactcgtggtatgctgctgccgttcccttttttaatgacgcctccatcatgtttgtgaagctcttacgttccgttgcgattggattaattgtcggcgctattctgctggttgccatgcctagcctgcgcagccttaacccgctttccactccgcaatttgacagtaccgatgagacgcctgccagctataatctggcggttcgccgcgccgcgccagcggtggttaacgtttacaaccgtggtttgaacaccaactctcacaaccagcttgagatccgcaccctgggatccggtgtaatcatggatcaacgcggttatatcatcaccaataaacacgtcatcaacgacgccgatcagatcatcgtcgccttacaggatggacgtgtatttgaagcattgctggtgggatctgactctctaaccgatctggcggtacttaaaattaatgccactggcggtttacctaccattccaattaatgcacgtcgcgtaccgcacattggcgacgtagtactggcgatcggtaacccgtacaacctcgggcagaccattacccaggggattattagtgccacgggtcgaatcggtctgaacccgaccgggcggcaaaacttcctccaaaccgatgcttccattaaccacggtaactctggcggcgcgctggtgaacagcctgggcgaactgatgggcattaatacgctgagctttgataagagtaacgatggcgaaacgccggaaggtatcggctttgcgattcctttccagttagcaaccaaaattatggataagctgatccgcgatggtcgcgtgatccgcggctacattggtatcggcggacgtgagatcgcaccactgcacgcgcagggcggtggtatagatcaactgcaagggatcgtggttaatgaagtgagtcctgacggcccggcggcgaatgcgggtattcaggtcaacgatctgattattagcgtggataacaaaccggccatctctgctctggagacgatggatcaggtggcggaaattcgccctggtagcgtgatccctgtagtagtgatgcgtgatgataagcagttaacgctgcaggtcaccattcaggaatatccggcaaccaattaagtcgtgcgctcaaaacaaaaaaccggagtctgtgctccggttttttattatccgctaatcaattacttattaacgaactcttcgcccagggcgatatctttcttcagcgtatccagcataccttccagcgcgttctgttcaaatgcgctcagggtaccgatagatttacgctcttccacgccgtttttacccagcagcagcggttgagagaagaaacgggcgtactgaccgtcgccttcaacgtaggcacattcgacaacgccttgttcgccctgcagtgcacgaaccagagacagaccaaaacgtgcagctgcctggcccatagacagggttgcagacccgccaccggccttcgcttcaaccacttcagtacccgcgttctggatgcgtttggtcagatcagccacttcctgctcggtaaaactaacgccaggaacctgactcagcagcggcagaatggtaacaccagagtgaccgccaataaccggcacttcaacttcgcctggctgtttgcctttcagttccgcaacaaaggtgttggaacgaatgatatccagcgtggtaacgccgaacagtttgtttttgtcataaacaccggcttttttcagcacttcagcagcaattgcaactgtggtgttaaccgggttagtgataataccaatgcacgctttcgggcaggttttcgcaacttgctgtaccaggtttttcacgatgccggcgttaacgttaaacaggtcggaacgatccatacccggtttacgcgctacgcctgcagagataagaacgacatctgcgccttccagcgccggagtcgcatcttcaccagaaaaacctttgattttcacagcagtagggatatggctcagatcgacagccacaccgggagtcactggagcgatatcatacagagagagttcactaccactaggcagttgggtttttaacagtagtgcaagcgcctggccaataccgccagcagcgccgaggactgcgactttcatcctaaactccttattatattgataaactaagatatgttgctccgctgccgcgaccttaatccacaaaattgccgtttacaatgaccacatctcaagaatgtgtagtcacgcaagtttagcgtttatgcatttaattgccgtaatcaggaacctaacttacgtaattaacagtcgcttatgcattagcgcaacattccaacaggtggtgacaatataccctaccgttcagccaaaacaacatcaatttgataacaattaatttacttttaagcagaatttgcatgccgtgacgcaggcatgtttctcaataacgaaatttgataaaatcccgctctttcataacattatttcagccttcttcagggctgactgtttgcataaaaattcatctgtatgcacaataatgttgtatcaaccaccatatcgggtgacttatgcgaagcagcgctaagcaagaagaactagttaaagcatttaaagcattacttaaagaagagaaatttagctcccagggcgaaatcgtcgccgcgttgcaggagcaaggctttgacaatattaatcagtctaaagtcagccggatgttgaccaagtttggtgctgtacgtacacgcaatgccaaaatggaaatggtttactgcctgccagctgaactgggtgtaccaaccacctccagtccattgaagaatctggtgctggatatcgactacaacgatgcagttgtcgtgattcataccagccctggcgcggcgcagttaattgctcgcctgctggacagtctgggcaaagcagaaggtattctgggcaccatcgctggcgatgacaccatctttaccacccctgctaacggtttcacagtcaaagacctgtacgaagcgattttagagctgttcgaccaggagctttaatctctgccccgtcgtttctgacggcggggaaaatgttgcttatccctctcaaccccctgctttcccctgcgattaatttaacgaatagtgcgttttactgcgacatgtcattcacacaatgaatacataaggtaaaaaaagcacattatgcaaaattcattatctaattgaaaaaactagaattaacgataaataaccgtatttttaattcttttttgttattaaaattcacatttttaacacttagtatcaactgaaacagttagcgcggtattaattagctcaataattagtgtatacttgattttgtgatatgggtcacgaaacaaaggcccagctaaaagattatgtcgaggtaaaaatcatgaaaatcaaaaccactgttgctgcattaagcgtactttctgttctctctttcggtgcattcgctgccgactccattgatgctgcacaagcacaaaatcgtgaagcaatcgggaccgtatccgtaagtggtgtggcgtctagcccaatggatatgcgtgaaatgctgaacaaaaaagcggaagagaaaggcgcaacggcctaccagattactgaagctcgtagcggtgacacctggcacgctacggctgaactgtacaaataaaccctcatcgtcttgtccgacgatattgcccccggttcgggggcttttttttgcgttaatgacgaacattaaaacgcaaatgcccttccagctcttcctctgcctcatcaaacagcaatattaacgcgccaaaacggcgacgcgttttctctcccagatgaacaaattcaatctcaagtggtagcggcaggacatcgttcattaacacatcccatagactgtcgagatcgcgtaccttatctttcgccagaccaaaggtttggctaaagtcacgataaaaatcctcctgactctcaatctcatcaaaatcaaaggtataaatattcatctgttgccaccgtcacgtttcgcggcgagttctgccgtgcatcgctaagtatagccatgaaaaaaccgacgcttttggcgtcggttttgacttaactatcggtcaacgcatgttgatacttatggagcatccccgccagccgatttaccggttccgtcacctgcggtggcgcttgccagatgcgtagcttttcctggtagatttccagttcttccagcaactggccaaagtaccgacgacgtttatcatcgctacgggcagatatcacatggtctgctgtgcggcgcatttgtcggtgaaacgcgcttaaatcctcgttaaccgggatcggtgcatcacgcaggcgctggtgcgcgataatcatcgtcagcgccaggcgaaatttcggcaaatcccctgggaacttattcatcagcaaaaacagctgctgataaagtgccgggaggtggttctctttacgacgtgccacattggtagtcatcgcggaaacagcggcagaaacaaactgattaagcagtacacgtccggtcctgtcgcggcttttatcccgcaccagcaaaataacggtgaacgcgagcacacagccgacgatttgccctaatgcgctgtcgagaaactgactgaaatggaaagtcatcgggttatccagcacgataatatttatggtgctggccagtgcccccatgctgcccagtcgccgtttctgtacttctataccgaggaagaatcccagcactgccaggctaatgcacagcagcaacatgctctgttgggtattagggataatcaccaaaaagtagagcagccctaacggcagcgcggccagcgtcccgtagataaagtcgatcgccaccatgcgtggattcggcaaacgcattgccagactcgtcactaccgcaatcatcaccattgcaccactgccggaagtccagcccgtccacagccagaaaagcgtgcccagaatgcaggaaagtgtggttcgccagaagttacccattgcatgatgacgttcggcactctctacttttacttccggttcgccttgcaggatctcttcttcggtggcgttgatttttgtgttactgataacgccgcgcttgagaagctgataacgcgttgccgccgcgacccagctataaatggtgacaggcgtttcccgttccccggtccaggcgataactctccgcaggcgtttgagctgcttgtggacgtcctgcgcggtttctaccggcgtgtcaaaaaattcgcggaaagtatcagtgatcaattccgggcgcgtattctgaataagataagtttcgcaggattgggtaatcagcgtcaggcttagcgtattgatcgcttttaaacgtcgattggcccgcgcccagcgggaagattccatattcaggttgctgcgcatgccttgtagcgccgtggtgcgtcgcaccaggtcgccccaggctttatcgacaacttcaccatcgccatgcttgatacagagttgcattaattgatattgcgcgaccagcaaactttccagctctcgatccacttcttgtttgatgcttcgcggagaaaagagcaaatccgccataatcgcacacacaataccgataacgatctcgctacaacgttcgacggcaaactgcggcgtaagcaatggttccggctgaatggtgatcacaatgatcagcgcggtataaccggccagcccccacgcatagctgttttctattcgtaccaggctggatatccaggtacaaaaaccggcccagatacagcacaccagaatcatcaataatggtgcgcggatcatcgcaatgatgatcaccagtccggcaatacagccaataaatgtgccgatgatgcgcaaaaagccacgatagcgaatagcgccagaatacggttcacctcccgcagcaaaggccgtaccggcggcaacaatcgccgctgtcagtaccgcccagcgtggcgtttccagctggaagtgaaagccaacaaacagcgccagtacaatggcggtcgccagttttaccgcaaagcgaatatgttggttagcaatggagaaaatacccatcgtgattaaccaaactcacgcaggcgatgggccattttacggaagaagctatcctggctttcgtcgcgatcttgtttgccagtgaccaccactgtagcagtggtgcccgcaggccagatgttctcttgctggttgtcgagacgaatacgaaccggaacacgttgcgcaagacgcacccattcaaggttagagtctatagtcgccatccctttgtcgtcacgcgtgctgctggcgttggtgacccctgcggcaacactatcaacagtccctttcagcactttgttactgccaagcggcgtgatctctgcacgataccccggacgcaccccttccagcttagtttcttccatataggccagtacatagaaggagttctgtttcaccagcgcaaccgccgtacttcctcgagtaataaactcaccggtatagacgttgaggttggtcacccagccatctgctggcgcgcggatcaccgtgcgttcaagatccagttttgccagatcgcgggtcgcctgcgctttcgctaactgatgcagaaccgtttgtagtacgttgttggcctggtcgatctcttcgcgagacatcgcctgcacaccgagacggttacgacgtccggcctcctggcgtttctcctgtgccagtacctgataataagcaacatcggcttgcgcttcctcaagcgccttttgatagcgcggctggtcgatggtgaacagtatctgtccttttttcaccagctggttatcatgaacattcacctgggtaatgagtccagaaacgtccggcgcgatcgcaacgacgtcagcgctaaagcgcgcgtcacgcgtccagggggattcggtgtaatagacccaggcattaaaaattgcgatgaaggccagaatgactaatacgaccgtgatggccgtacgggagaattttcttattagtgttttcacttcaacctcaaacgaacagtcggcttatcaaataaaacaagcagcaatagagcgcggtgttgaacaacgccggatgccagacaaagtcgtagatacctgttggcacaagtacccggcgcaccagccagaaaatcgccagacttaaaagcaattcaaaaaatatcggtgggaaggacagcccaaacaccacgataacgggaaacagactcatgttgaccttggttgtaaagagagagcaggcgttattattttcagcatctgtcgccgcagagaagggcatggaaagccgggcgagagcaacattgctgtagattgatatttaatatattagcgtaactgttatgctgttatctatattatgtgatctaaatcacttttaagtcagagtgaataatggaacgactaaaacgcatgagcgtgtttgccaaagtagttgaatttggctcttttaccgccgccgccagacagctacagatgagcgttagctccatcagtcagacggtaagtaaactggaagatgagttgcaggtaaagctgttaaaccgtagcacacgcagcattggcctgaccgaagccggtagaatttactaccagggctgccgtcgtatgcttcatgaagtgcaggatgttcatgagcaactgtatgccttcaataacacccccatcgggacgctacgcattggctgttctagtactatggcacaaaatgttctcgccgggctgacagccaaaatgctgaaagaatacccaggtttgagcgtcaatctggttaccggaattccagcccccgacctgattgccgacggtctggatgtggtgatccgcgtcggcgcgttgcaggattccagcctgttttcccgccgtctgggcgcgatgccaatggtggtgtgcgccgcgaaaagctatctcacacaatacggcataccggaaaaacccgccgatttgagtagtcatagttggcttgaatacagcgtgcggcccgacaatgaatttgaactgatcgcaccggaagggatcagcactcgcctgatcccacaaggaagatttgtgactaatgatccgatgacgctggtgcgctggctgacggcgggtgccgggatcgcctacgtgccgctgatgtgggtgatcaacgagatcaatcgtggggagctggagatcctgctgccgcgttaccagagtgatccacgcccggtttatgcgttatataccgaaaaagataagctgccgctgaaggtacaggtcgtgatcaacagcctgacggattattttgttgaggtcggtaaattgtttcaggagatgcacgggcgcgggaaagagaagtaattcatattgtactgttacgttgtacaaacctgtgccaacgggttcccctcaccctaaccctcaccccaaaggggcgaggggaccgttcgtgcacgtagaaagattaattatccttctgaaaatagtgaaattattacgcagtaccgccaacagtcaggttatcgactttcaacgttggctggcccacgccaaccggcaaactttgcccttctttaccgcagacacccacgccgttatccagtttcaggtcgttgccaaccatgctaatctgctgcatggtttcgataccggaaccaatcaacgttgcgcctttcaccggcttcgttactttaccgttttcaatcagatatgcttcactagtggagaaaacgaatttgccggaggtgatatccacctgaccgccaccaaagttcggtgcatagataccgtactcaacggattcaataatttcctgcggggtgcttttacccggcagcatataggtgttggtcatacgcggcatgggcagatgggcgtaggattcacggcgaccgttgccagtcggcgtcatccccatcaaacgcgcgttgagtttatcctgcatgtagcctttcagaatgccgttctcaatcagcacgttgtactggcctggcgtaccttcgtcatcaatcgccacgctacctcggcgatcgaccatcgtgccatcatcaaccacggtacacagttcactagccaccagctccccgacctgtccactaaatacactagtgccacggcggttgaagtcgccttccagaccgtgaccaaccgcttcatgcaacagcacgcccggccaacctgcgccaagtactaccggcatggtgcccgctggtgcagcaacggcagaaagattgaccagcgccatacgcactgcttcttttgcccatgcatccgcacggacttcgccgtcgagatcggcaaggaagaattcataaccaaaacgaccgccgccgccactggcaccgcgttcgcgtttgccatcttcttcgacgagaacgctcacggaaagacgcaccagcggacggacatccgccgctagcgtgccgtcggtggccgcaaccaaaattaattcatagacaccactgaggctggcagtcacttcctgtacgcgcttgtccgcttcgcgggcaaccttatcgacgcgacgcaggatatccagcttctcttcacggctcatgctttgcagcggatctacgctggtatacaacgggctatgctctaccgcgcccagcgtctgtactttaccatcaccactatcacggacgatggtgcgcgccgcttgcgcactctgttccagcgccagcaggctgatttggtcagcgtaagcaaatccggttttttcaccgctgattgcacgcacaccaacgccctgatcgatgttgtaagaaccatctttaataatgcggtcttctaaaacccaggattcgtgatagctgctctgaaaatagagatcgccataatcaaggcgacgttcggccagttgaccgaggatcgcgaacaagtcctgatgtttcaggccgttcgccgctagcaattgttcacttaccaggttaagactcatcgtttttgctactcgttagttactgcagtagaggattttttacggctgccggatgcggcgtgaacgccctatccagcctacggttatgttccggtttgtaggcctgataagacgcacagcgtcgcatcaggcaacggctgtcggatgcggcgtaaacgccttatccgacctacggttatgttccgtttgtaggcctgataagacgcacagcgtcgcatcaggcaacggctgccggatgcggcgtaaacgccttatccgacctacggttatgttccgtttgtaggcctgataagacgcacagcgtcgcatcaggcaacggctgccggatgcggcgtgaacgccctatccgacctacggttatgttctggctcgttggcctttggcaacgattatcctatgagattggggcaattacgcgccctcgtcaaatcattgcgctttttctttacgcggttggcgcaacacttcgttgatttgcggatcgtccagcggaccgctaatgtgatagcgcaaaatggagactttgctccacagcggccccagcactttactggcggcaaacactgccgcgccaacaatggggttaaccgcaaaagccgcagccacgcccaccgtcgcagaaatctctggtgcgacaaccgcttccatattcaggtcgcgacgtaccagatttacgctccctttcatggcgatatccgcctccaggccatccaccagcgtgtcgtcggtgtgcataacgccgtctttaatccacgcggtgctgcgaatggagtcaaaatagaacccttcgccaaaagtgtctctgaaatcaaaacgcagcttacgcatcagggcatctacgctcaataagcgcagcaattgcccggcatgtccggtattgatttcggtaatttcgcctttacccagttgagtatgaatgatgccattcaacgtcgcttcatctggctgccagggtgctttgcgccagtgtaaatcgtaatccacattaaaactgctctggcgtatgggcgtcgtgacaccaaaaaattctgcggcggcatcaattttctgcccgcgcagttttcctttcaggctggtacgttcattccccggattattaacccattcaccatcggcagtaagccggctgaaaccagtatcaatcagtccattggtcagcgttaacgtatcgccagaaatggtgatatcactgtcaatgcgaccgaatttttgcccccagaaccagcactctgtgcatcgtatttgggcgtccggccagccacggaagttaatgcgctccgttgtcgggaaaggactactcggcgtactatcaccacgagttttcgccacgctcgggttgtaataaagatatttgatattcgccagccacggcgcgttattacgcatcgctagcgtggcgttgatttcacgcccttgcgcttcaaccagggtgccatttgccgtcggttggctaacaatactcaggttattccattgctgatttcccagactcaacataggcgtacgtaacgttatgtgttgtgggaaactcgctgcaccaccgacactctccgcagcgcctttctggaacagggccagccactcggcaccattcatcggcggcatattgagttcaacgccactttgttccggcaacggcgggagcgttttactgtctgccgcccaaatagcacgatcgagcgtcagcttttgaccgagcaaccagcggctattgaaatgattatccgcaccagcctgtccggttaattcaaagctgttgagattgccatcaaccttaacgtttaccgctagtggttcacccgcaggtttggctaacggactaggtaagtgactgctcacattctttagatcgccgttcagctctatgttataggtcgcaccagcatgataaggcagatcaatgcccactttaccatcccacgccacgctgccactcaatgcttcgttcaccgcttcaggcagaacgccggttttcgccggttgccagttaccgttgaggtttaccgctacctggtaggcttttgccccttctttggtggaaaaatccacgttcaacggctgattaaaccagcttgctgtcagtggttcactttgcagatcgctattgataaagctgaatttaccgctcaaatttttcagggtgctgtcgagtggtttgataaacagactgttattacgcagcgtcacttcacctttcgcggttaccagttcgccgttcagcgggatatcaagatgtaagcgagcattcacatcgccgtcgagctggagttcttgcagggtcgcacccagagaatctttcagcggtgtctcatcaaagtaagggccaacggctttacccggacctttaatgtcagcgtcaatcagcagtttttctttactgtagtcagggatcactgcggtaagattactcgcgcgcacgccgcccagattaacgccatcggttttcatccataaaccgtcgttaataaagtccagttcaatatcaaggttagttaatgcaggccagtccggctggaaggcaaacttcgcgttgcgcagcggcaccagcacttcaaactgaccttcgttgtgtttataggggaagagttgcggattgccaccataaaccagcgtcgcgttatccgcttcaccgccctgaatcgcgccacttaagtaatcaaccaggtctttacccatcaagttttccgggaaatagcgccaggcttgactaccatcatcggtactgatgccagccagaatacccagccagggttcatcgttagcaggttgcaggtaacgaaaaccgccgcgcgcatggacggctttggctttaacgtcaatattacgcccatccagctggaaacctttgttattgttcagccagcttatagttgcctggccgtcggcgatttctagtggcgcacggaataccgtttcgtaaggcatctttgcctgcttcatgctcgcggtaagcaaaccattttcaacgctgccggaaagcgtcccggagaagtgttccgcacccggtaataatttccattgcttccaggccagatcgctccagcttgcctgaaaacgggtcttgtctgccgcctgaagcgggatatccagcgccagagtgttaatcttgccgctcggttgtgtggagcgccaaacatcacccagtgcaggactaagtttcgcggccagcgggcgtatgccctccaggcctgccagctccagattactggcgcgaatccggagttcgtcactgcgtttattgtctttgccgccaacgtcctgttccggtatccaggccagcgtcaatgctccgctcggccagggtttgccgtccatcgtgatccgtgtatcgggaatagagaactgccagcccggattttcacgcgtaatatgcgcggtcagattatccacgctcagcgtatgcgtttgcttctcgcccaaccagctggcaccgccctgtttcagccagacgtcaccgccggttacatcgcctttgtcgatcgtcatccagccttcaagggagaactgtgccgtttccagcgcaatattgtcctgcatccatttaccgagccacggcttcaggtcgatgtcatccgcctggagccagacgcgaccattgcttaacaacccctcatcatcgcgcaaatccatgcgcacctgcatcacgccgtgctgtccggtaaggctggagaggcttaccaggccttccgcacggtgtcgacgtggatcgttcagccaggtgagttgtgggatcgccagctcggcgcgctgaccggatggcgtcaggaaactgacttcactgtcgcgaagatcgaaatggtcaaattgacgaagaaacagatcgctgatgtgactggcttccagactgtcatcactaccaccgctggtgataggagtgttggtgcgaaagcgcagctgccagaaagtgaggtcgcgaaactgccagcgcatatgtaacaggctctgccagacatccagcgccagagtaacgcgtttaacgctaaattcgccgccatcttttagttctgcacggatgtcgtgtgcttcaagcgtcgggccaaaattctgccagctggcactgagctgactggcttctaccggcatgccagtcgcggattctattttgttgaggatttccggacgccaggcgtcaagatgcggtaaagcaatacgcaggccgctaaccagcagggcagcgatcacaacgagcgcggctccagtaagcagtaaaatccccggcaatcgcctcacccgtcactccttgtctgctaaaaatgtgactcaaaaaccctttgccggatggcggcccagcatctgtttacatcattacgacgtcaaactgctcctggttatagagcggttcaatttgtactttaacctgtttgccaacgaaaatttccacttccgccaggctgtgactctcttcgcctttcaaggcttcagctactgccggagaagcatagaccaggaaacggtcggagtcgtaagcatggtggacacgaacaatctcgcgcatgatttcatagcataccgtttccacggttttcaccgttccgcgaccgtggcaggttgggcattcgttacacagtacgtgctcaatgctttcgcgggtgcgtttacgcgtcatctccaccagccccagcgcgctaaaaccattaacgctggttttcacccggtctttgctcaacgcctgctccaggctgtgcagcactcggcggcggtgatcttcattattcatatcgatgaaatcaataatgataatcccgcccagattacgcaaccgtaactggcgagcgatagcctgcgtcgcttcaatattggtattgaaaatggtgtcgtccagattgcgatgaccgacaaacgctccggtattgatgtccacggtggtcatcgcttcggtctggtcgataatgagataaccaccggatttcagttctactttgcgttccagcgctcgctggatttcgttttcgacatcaaagagatcgaaaatcggctggcgtcctgtgtaatgctccagcttgcttgtcatctcgggaatgtactcgctggtgaactcaagtaacgcttcgtaagtcaggcgactgtcaacgcgaatgcggtccagttcggcatcggcgaaatcacgcagaacacgctgcgccagcgccagttcgccgtacagctgataacgggtctgcgggcgttttttacgctccataactttggtccagacgcgtttcagataagcggcatcggaggccagttcagcctcgccaaccccttccgctgcggtacggatgataaacccgccctgctcgtcgcaatactctgcgaccacttttttcaggcgttcacgttcactttcgctttcaatacgttgggaaaccccaacgtgagaagcccctggcataaacaccagatagcgagaagggagcgtgatatcggtggtcaggcgcgcacctttagtgccaagcggatctttcaccacctgcaccatcagatcttgcccctgacgaaccagttcgctgatgtcgcgcaccgtgaattgcttttgttcttcacccgccacacattcggtgtgcggcatgatgtcggatgcatgaagaaacgcggctttatccagcccaatatctacaaaagccgcctgcatacccggaagtacacgacttacacgacccttgtagatattgcctactattccgcgtcgcgcctcacgttcaatatgaatttcctgcagaataccgccatcaatatacgccactcgcgtttcgctaggcgttacgtttactaacaattcagccgtcatgtttatcccttttctcacgcagtgcgttaaaattacttaataattcatacgtttcaaccagcggtaagccgactacggcgtgatagctgccatttatcttcctgacaaaacagccacccagcccctgaataccgtatgcacctgctttatctaacggttcatcgctggcgacatagcccgcgatgtcttcgtctgttaacgttctgaaagtcacatcggtgaccaccaggcaatcgagaatgtgctggctgtcggccaacgccactgctgtcatcacctgatgggtctgaccgcttaatttgcgcaacatctgcgccgcatgctctgcgtcgcgcggtttctccagcacttctccgttcaggataacgatagtatccgcacccagcaccgggagatccttcgccgtttgcgcgacacctgcccgtgctttctcgcgcgccagacgcacaacatactgctgcgcgctctcctgcggctgacgctgctcctcaatgcccgtaacaatacgttcaaaggtcacgccaagttgcgcaagtaactcctgacgacgcggagaaccggaagctaaatacagagaagtcatagaaacctttattgcactgcaaactgctgacggactttgcgcatcagcaagaaaatccacggccagagcaccccattgactacactactccagaacacttccggtctgaaagagacgttaatcactaaaaactctgcccagaaaacaataatatccaccaccaggctaagcaacatgacgaccagcgcctgctgccataatgcgaggttgcggaaaagctggtatttcagcgccaccaggtaagcaatgatgctcatcgccaatacgcgtacgccaagcgtgctgccgctgatcagatccagtatggcacccatcacaaaacctgtgcccacatttacgcgatgaggcaaggccaggatccaatacaacaagatgagtaacacccagtttggccggaaaacaatcaggttatccggccagggcatgatttgcagcaacagcgcaatgaggaaagagagccagattacccagcgtccctggctacgatagctcgccactattgccctcccggcgcacgttattgccctcccggcgcacgcgcaggcggttgagcaccactttgcggcggcgtagccctttgtggagagcgattagcagcaggctgtgtcggcgcagcaggcgcagtagctgcatttcctgtcgccggttgctgcggagtcggctgagcgatccccgttgccggttcaggtaactttggccccatcgcgtctgggctaggcaatacctgcggcatcatctgcatcagacgttcattagcaacacgatgcacctcttccggcgtcatcgggttagcgccgttacgatctgccccccacagcagcagcagataacgcaaacgttgcagccctgcagtcggacgcgcctgaatcacagtataagcgcgctgggtatcgagttttacggaagagacaaccgcgaccggatagccttccgggaaacgaccgcccagaccggaagtcaccagcacatcaccaacacgaatatccgtattcgccggcagatgctcaagctgcaaatcatccgtacaaccgttaccggctgcaattacgcggatatcgttgcgcagcacctggattggcagcgcgtgggtcgcatcacaaatcagcagcacgcgactggtcagtttagcgacggccaccacctgaccaacaacacctttgtcgctgatgaccggctggccttcataaacgccattaacgctacctttatcgataacaacttgatcgctataaggatcgttaaccgtggagataacctgagtcaccattttctgctcatcctgacgcagcggggaacccagcagctcgcgcagacgcgcgttctcctgtttgtattgtccaagcatcagcagttcactgtttttcagcaacagttcctgacgtaacgcccggttttcaagttctaattggtcacggctggccagcgtctggcttacgccatccagcaattcacgaggagcattggaaacaaagtagaaaggactgacggcggtatccatataagtacggatttgactgaacgtccccaggcggctgtcggcaataataatgccgagcgccaccagcaccgccagaataaggcgaatctgtaggctcgggccacggctaaaaattggcttcataagttatgcgtattctcgtatcagaccaggcagggtaaacagacacttcccctgcctgcatccgattactcttcgctgaacaggtcgccgccgtgcatgtcgatcatttccagcgctttgccgccaccgcgcgccacacaggtcagcgggtcttcagcaacaacgactggaatgccggtttcttccattaacaaacggtcaaggttacgcagcagtgcgccaccaccggtgagcaccatgccgcgctcggagatgtcggaagccagttccggcgggcactgttccagtgcaaccattaccgcgctcacaataccggtcagcggttcctgcagtgcttcgaggatttcattggagttcagggtaaaaccgcgtggaacaccttctgccaggttacggccacgaacttcgatttcacggacttcatcgcccggataagcgctaccgatttcgtgcttgatacgttctgcggtggcttcaccgatcagagaaccgtaattacgacgcacatagttgatgatagcttcgtcgaaacggtcaccaccaatgcgcacagaagaggagtaaaccacaccgttcaaggagataacagcaacttcagtggtaccaccaccgatatcaaccaccatagaaccggtcgcttcagaaaccggcaggccagcaccaattgcggcagccatcggttcttcaatcaggaagacttcacgggcaccagcgccctgcgcggattcacgaattgcgcggcgttcaacctgggtcgcgccaaccggcacacaaaccagaacgcgcgggcttggacgcataaagctgttgctgtgcacttgtttgatgaagtgctggagcattttttcagtcacgaagaagtcggcgataacgccgtctttcattgggcgaatggcagcaatattgcccggcgtacggcccagcatctgcttcgcgtcatgacctactgcagctacgcttttcggactaccggcacgatcctgacgaatggccaccacggaaggctcattcaatacgatgccttgtccttttacataaatgagggtattcgcagtacccaggtcaatggacaagtcattggaaaacatgccacgaaattttttcaacatactaagggataatcctgaaagctggggcggaaaagaaaatccgcttactttaccaaccacacgcagcagcgacaaggcgcaaaaatcatctgctacggtgaaaattagtgcagttcgtttcctttgttacaaatctctgcctgagtccagaaaggcttaatgcatcagcagcattcctcgcctgtttgcaaccgcgtaaggtcattcatctgcatatgtgctgcaacaatctggcgagcagacaagcacactcccatgagacgcagcgcgcattattctacgtgaaaacggattaaacggcaggttaaacgctgtatctttgactatattttttcacgttagtatcaagtggctgactggacgcgaaaaaatccccttgcccgcctgtaacaccgcgctgaatcagggtctgccactcgcttcggctacgcacgccggtggcgtaaacctgggtgctggtcccggagcaggcttccaccaggctttgaaccagcagctggttctccgttcgcttctcaatgtttctgaccagccccggatggagcttgagtaactcaacattaagttctttgatccaactggtacttaccagcgtcaaaccagcctggttgacggctacccgtacccctaaagcattcactaaacgaataacaggttgtaaacgactgatatgttgacctacatcggcctctgcaagttcaataattatgcgttttcgttgacttttttcacattgcattaacgtatcgcgcagccaacgctgaaaacgcgggcgaatcaggctctcaacggtaacctgaatcgccagattttcctctggccagtaacgcaatagtggaataagacggctgatttgcagacggtcatactcttcgcttaagccaaactgcaagaccatcggcatatgctccgcgctgctaacctcttcattaccatcgaagatgcggcacatgagttcgcgatgatgaacctgaccttcgcgagtaaccgccggtttttgataaaggcgcgggccgccgcgactgagcatttgctcgataagcgtacgccagcgaacattaccgcgtcctttttcaggcaagctgtcatcgtaaatagcccagctattgccgccctgcaatcccgcattacgcgtggcagactctgcatgttccattacctgctcggtatcctgaccactacgccaggcgcagataccaatgtggatcatatcgtcgcgatcgagcattttattgttcggcaaggtatcaacggctttgattaactgaccggcgatgctctctgcctcttttaacgtccggtgcggtaacagcgcagcaaaatcactgcggtggtaacgcgccagcagtgcgccagggtagcgcatcataaatgtgctcagcagattcgtcagagtgaagaactgttcttcaacctggctgtgcccccaggtatcgctcaacatattgaaatccggcagacgaatcatcatcacgatcccgtgggtacctactttctcctgatcttccagtaacgttgctaactgattatcgaaaaagagtcggttattgaggccggttttcacgtcctgggcggcataagagcggatcagcgtatcaagacggctgtgttgttcgcgtgcgttctgaatttcacgaagcagcgtatccagcgcactgctggttctgggcggccattcatagatggttcccaacacattagagccacgctcaccgtttaagatacgagtagcccgggtttccagcaattcttgcccggcaagttgccgttgtaaccagcgtaccgccaggaagagcataacaatgataaagccaatcgcccccgtgagcggcgcggtggtcatcaagctatggaaatagttgcccatcggatcctgataaaccagacgcaagctcatccccggatgctttatcaacggaacgctcagttcgcgaaacagatcgctggagccaactggacgataactaccatttctggccagggtataaacctgtttatcaccatggagcaggtctacacgaacgatatctgcgctcatcattaattcggtaatttgtggccttaatacgctgaagtcattgctcacaaggtgggtatcaatcgccgtcgccaccgcctgaacgcgatgactaaacttatactgaatggcgttgtagaaacttaggctacagcccagcaaagtcacaaaaattgttaacccggtgagcagcgtaacaaaggcgctaaatttcgtcgttaatctcatccttgtgttaactccgatagtgaggaagcgggcatactagcaaatcagatttatctcgcaatttattgcgcttcatcggctttgcttttccattagcgagtatagtcttcagaaattattttccaatccatcatgcacatgaggaccacttatgcaggcgttacttttagaacagcaggacggcaaaactctcgcaagtgtacagactctggacgaaagtcgcctgccggagggcgatgtcacggtcgatgttcactggagcagcctgaactataaagatgcgctggcgattaccggtaagggaaaaatcatccgtaattttccgatgattcctgggatcgattttgccggaactgtacgcaccagcgaagatccgcgttttcatgccggtcaggaggtgttactcactggctggggcgttggtgaaaaccactggggtgggctggcggagcaggcgcgagtgaaaggtgactggctggttgccatgccgcaagggctggacgcgcgtaaagcaatgattatcggtactgccggttttaccgccatgctgtgtgtgatggcgctggaagatgccggtgttcgcccgcaggacggggagattgtcgtgacgggtgccagtggtggcgtcggcagtaccgccgtggcgctgctgcataagttgggttatcaggtcgttgccgtttccggtcgcgaaagtacccatgaatatctgaaaagtttaggtgctagccgtgttctccctcgtgatgagtttgccgaatcccgtcctctggaaaaacaagtctgggctggggcaattgacaccgttggcgacaaagtgctggcaaaagtgctggcgcaaatgaattacggcggctgcgtggcggcctgtggtctggcgggtggttttactctgccaaccacggtcatgccatttattctgcgtaatgtccgtttgcaaggggtggatagtgtaatgacgccaccagaacgccgcgcacaagcctggcagcgactggtcgccgatttaccggaaagtttctatacccaggcggcaaaagagatatctctgagtgaggcaccgaactttgccgaggccatcattaataaccagatccagggtcgcacgctggtgaaggttaactaaccatttagcagggaataataagagagggaactcattttgaaatcattattcaatcggttaacgggaaaagcggttagccggacagctttcgtcgaacaccttggtcaggaagttatacaacatcatccaaactggaaagtcatgatttcgactgaccacaaattgatgcgcattgatactccactaaacagctattattgatacgcctccgtcgcctgttaggtttatgttgctttgcctgggcgacgctacgcttagccccttacttatttctggtaccatggggtgaataatctgattttgtttgactacaaattaatcactcgaacctatttaatgctgagcattgtcaatcggttaattttgcgtgctttagcattcacatctatccagacgatgcagtgaaaattgggtaatccccagcaaccgctgcgtaatgtcgtctatcttgtcgcgatcctggcatccctacattatttgtggtctgtgaagattatctcattgcagcccctcatcttcgcagggctggcttttcagcttttcaccttacgttataagaagttccgtcgatgatggcgctaatttcgtgaattgtgcggcttgttgcaaattacacggtgttgaaggttatttacatgttagctgttgattatcttccctgataagaccagtatttagctgccaattgctacgaaatcgttataatgtgcgacctcgtcctccctgacgcagtttttgcgctgcggaaaaggtgacattggcgcaacgaaggtatattttgttttttgccggaggatagcagcagatcgctgcacaatgtccgtcaagtctaacattgacactctggggcaaaatagaccggcgtcccggcctgctggaatttatcgctatgcatacagctgtcggggcatacgctttacagacggcggtgaaacgcctgtcacaatcacactaaacaaagagtacggaacccactcatggatattcgtaagattaaaaaactgatcgagctggttgaagaaagtggcatctccgaactggaaatttctgaaggcgaagagagtgtacgcattagccgtgcagctcctgccgcaagtttccctgtgatgcaacaagcttacgctgcaccaatgatgcagcagccagctcaatctaacgcagccgctccggcgaccgttccttccatggaagcgccagcagcagcggaaatcagtggtcacatcgtacgttccccgatggttggtactttctaccgcaccccaagcccggacgcaaaagcgttcatcgaagtgggtcagaaagtcaacgtgggcgataccctgtgcatcgttgaagccatgaaaatgatgaaccagatcgaagcggacaaatccggtaccgtgaaagcaattctggtcgaaagtggacaaccggtagaatttgacgagccgctggtcgtcatcgagtaacgaggcgaacatgctggataaaattgttattgccaaccgcggcgagattgcattgcgtattcttcgtgcctgtaaagaactgggcatcaagactgtcgctgtgcactccagcgcggatcgcgatctaaaacacgtattactggcagatgaaacggtctgtattggccctgctccgagtgtaaaaagttatctgaacatcccggcaatcatcagcgccgctgaaatcaccggcgcagtagcaatccatccgggttacggcttcctctccgagaacgccaactttgccgagcaggttgaacgctccggctttatcttcattggcccgaaagcagaaaccattcgcctgatgggcgacaaagtatccgcaatcgcggcgatgaaaaaagcgggcgtcccttgcgtaccgggttctgacggcccgctgggcgacgatatggataaaaaccgtgccattgctaaacgcattggttatccggtgattatcaaagcctccggcggcggcggcggtcgcggtatgcgcgtagtgcgcggcgacgctgaactggcacaatccatctccatgacccgtgcggaagcgaaagctgctttcagcaacgatatggtttacatggagaaatacctggaaaatcctcgccacgtcgagattcaggtactggctgacggtcagggcaacgctatctatctggcggaacgtgactgctccatgcaacgccgccaccagaaagtggtcgaagaagcgccagcaccgggcattaccccggaactgcgtcgctacatcggcgaacgttgcgctaaagcgtgtgttgatatcggctatcgcggtgcaggtactttcgagttcctgttcgaaaacggcgagttctatttcatcgaaatgaacacccgtattcaggtagaacacccggttacagaaatgatcaccggcgttgacctgatcaaagaacagctgcgtatcgctgccggtcaaccgctgagcatcaagcaagaagaagttcacgttcgcggccatgcggtggaatgtcgtatcaacgccgaagatccgaacaccttcctgccaagtccgggcaaaatcacccgtttccacgcacctggcggttttggcgtacgttgggagtctcatatctacgcgggctacaccgtaccgccgtactatgacagtatgatcggtaagctgatttgctacggtgaaaaccgtgacgtggcgattgcccgcatgaagaatgcgctgcaggagctgatcatcgacggtatcaaaaccaacgttgatctgcagatccgcatcatgaatgacgagaacttccagcatggtggcactaacatccactatctggagaaaaaactcggtcttcaggaaaaataagactgctaaagcgtcaaaaggccggattttccggccttttttattactggggatcgacaacccccataaggtacaatccccgctttcttcacccatcagggacaaaaaatggacactcgttttgttcaggcccataaagaggcgcgctgggcgctggggctgacccttttgtatctggcagtttggttagtagccgcttacttatctggcgttgcccccggttttaccggctttccgcgctggtttgagatggcctgcatcctgacgccgctgctgtttattggactgtgctgggcgatggtgaaatttatctatcgcgatatcccactggaggatgacgatgcagcttgaagtaattctaccgctggtcgcctatctggtggtggtgttcggtatcagcgtttatgcgatgcgtaaacggagcaccggcaccttccttaatgagtatttcctcggcagccgctctatgggcggtattgtgctggcgatgacgctcaccgcgacctatatcagtgccagtagctttatcggcgggccaggagctgcttataaatacgggctgggctgggtattgctggcgatgattcagcttcctgcagtctggcttagtctcggtattctcggcaagaagtttgcgattcttgcgcgccgctacaatgcagtgacgctgaacgatatgctgtttgcccgctaccagagtcgtcttctggtgtggctggcgagtttgagtttgctggttgcgttcgttggtgcgatgaccgtgcagtttatcggcggtgcgcgcctgctggaaaccgcggcgggtattccttatgaaaccgggctgctgatttttggtatcagcattgcgttatataccgcctttggtggctttcgcgccagcgtgctgaacgacaccatgcaagggcttgtgatgctgattggcaccgttgtgctgcttattggcgtagtacatgccgctggcggcttaagtaacgcagtacagaccttgcaaaccatcgatccgcaactggttacgccacaaggcgctgacgatattctgagccctgcctttatgacgagcttctgggtactggtgtgttttggcgtgattggcctgccgcatactgcggtgcgctgtatctcttataaagacagcaaagccgtacatcgggggatcatcatcggtacgattgtggtcgcaattctgatgttcggtatgcacctggccggagcgttaggtcgggcggtgatccccgatctcaccgtaccggacctggtgatcccaacgttaatggtaaaagtgctgccaccgtttgctgccgggatcttcctggctgcaccgatggctgcgatcatgagcacaattaacgcccaactgctgcaaagttccgctacgatcattaaagatctctatctgaatatccgtccggatcaaatgcaaaacgagacgcgtctgaagcggatgagcgcggtaattacgttagttctcggcgcgttgctgctgcttgccgcctggaagccgccagaaatgatcatctggctgaatttgttggccttcggtgggctggaagccgttttcctgtggccgctggtgctgggtctttactgggaacgcgccaacgccaaaggcgcgctaagtgcgatgatcgttggcggcgtgctgtatgccgtactcgcgacgctgaatattcagtacctgggcttccaccctatcgtgcccagcttactactaagtttgctggctttcctggtcggaaaccgtttcggtacatccgtcccgcaagctaccgttttgactactgataaataaagagttttgccatgccttggatccaactgaaactgaacaccaccggcgcgaacgcggaagatcttagcgatgcgctgatggaagcgggtgccgtttctatcacttttcaggatacccacgatacgccagtatttgaaccgctgccgggcgaaacgcgcctgtggggcgacaccgatgtgattggtctgttcgacgctgaaaccgatatgaacgacgtggtggcgattctggaaaaccatccgctgctcggcgcaggcttcgcgcataaaatcgaacaactagaagataaagactgggagcgcgaatggatggataatttccacccgatgcgctttggtgaacgactgtggatctgccctagctggcgtgatgtgccggacgaaaacgccgtcaacgtgatgttagatccagggctggcgtttggtacgggtacccatccaaccacctctctgtgcctgcaatggctcgacagcctcgatttaaccggtaaaacagtcatcgactttggctgtggttccggcattctggcgatcgcggcgctgaaactgggtgcagcaaaagccattggtattgatatcgatccgcaggcgattcaggccagccgcgataacgccgaacgtaatggcgtttctgaccgtctggaactctacttaccgaaagatcagccagaagaaatgaaagccgacgtggtggtcgctaacatccttgcaggcccattacgtgaactggcaccgttaatcagcgtcctgccggttagtggcggtttgctgggcctttccggtattctggcaagccaggcagagagcgtttgtgaagcttatgccgatagcttcgcactggacccggtcgtggaaaaagaagagtggtgccgtattaccggtcgtaagaattaaccttcgcatcgccgtagggtgacgcggggcgaagtgcgagcaagctcacaaaaggcacgtaaatttgccgattatttacgcaaatttgcgtgccaaaattttcattcataaagaaaaattgagaacttactcaaatttctttgagtgtaaattttagtcactattttctaatatgatgatttttatgagtaattatcgcaccacgctcattttaaatgcaattctttgatccatctcagaggattggtcaaagtttggcctttcatctcgtgcaaaaaatgcgtaatatacgccgccttgcagtcacagtatggtcatttcttaactcatgcgcatcggacaatatcagctcagaaatcgcctgatcgcagcgcccatggctggcattacagacagaccttttcggacgttgtgctacgagatgggagccggattgacagtatccgagatgatgtcttctaacccacaggtttgggaaagcgacaaatctcgtttacggatggtgcacattgatgaacccggtattcgcaccgtgcaaattgctggtagcgatccgaaagaaatggcagatgcagcacgtattaacgtggaaagcggtgcccagattattgatatcaatatgggttgcccggctaaaaaagtgaatcgcaagctcgcaggtagtgccctcttgcagtacccggatgtcgttaaaagcatccttaccgaggtcgtcaatgcagtggacgttcctgttaccctgaagattcgcaccggctgggcaccggaacaccgtaactgcgaagagattgcccaactggctgaagactgtggcattcaggctctgaccattcatggccgtacacgcgcctgtttgttcaatggagaagctgagtacgacagtattcgggcagttaagcagaaagtttccattccggttatcgcgaatggcgacattactgacccgcttaaagccagagctgtgctcgactatacaggggcggatgccctgatgataggccgcgcagctcagggaagaccctggatctttcgggaaatccagcattatctggacactggggagttgctgcccccgctgcctttggcagaggttaagcgcttgctttgcgcgcacgttcgggaactgcatgacttttatggtccggcaaaagggtaccgaattgcacgtaaacacgtttcctggtatctccaggaacacgctccaaatgaccagtttcggcgcacattcaacgccattgaggatgccagcgaacagctggaggcgttggaggcatacttcgaaaattttgcgtaaacagaaataaagagctgacagaactatgttcgaacaacgcgtaaattctgacgtactgaccgtttctaccgttaactctcaggatcaggtaacccaaaaacccctgcgtgacagcgttaaacaggcactgaagaactattttgctcaactgaatggtcaggatgtgaatgacctctatgagctggtactggctgaagtagaacagcccctgttggacatggtgatgcaatacacccgtggtaaccagacccgtgctgcgctgatgatgggcatcaaccgtggtacgctgcgtaaaaaattgaaaaaatacggcatgaactaattcaggttagctaaatgcttgattaaaaaggcgctactcggcatggggaagcgccttttttataggtgtcacaaagggagtgaccatgagaacaggatgtgaaccgacccggtttggtaatgaagctaagaccattattcacggtgatgcgcttgccgaacttaaaaagatccccgccgaaagtgtcgatctgatctttgccgacccaccatataacatcggtaaaaattttgatggtctgatcgaagcctggaaagaagatctgtttatcgactggctgtttgaagtgattgcagagtgccaccgcgttctgaaaaagcagggcagcatgtacatcatgaacagtacggaaaacatgccctttatcgatctccagtgccgcaagctttttaccatcaaaagtcgcatcgtctggagttatgacagttctggagtgcaggcgaaaaaacactacggctccatgtacgaacccatcctgatgatggtgaaagacgcaaagaactacacattcaacggtgatgctattctggtagaagccaaaaccggaagccagcgcgcgttgatcgattatcgcaaaaatcctccacagccttacaatcatcaaaaagtaccgggtaacgtttgggattttccgcgcgtgcgttatttgatggatgaatatgaaaaccacccgacgcaaaaaccggaagccttactgaaacgcattattctcgcctcttccaacccaggcgatatcgttctcgacccgtttgctggtagctttactaccggtgccgtagccatcgccagcggacgaaaattcattggtattgagatcaacagcgagtacatcaaaatggggcttcgacggctggatgtcgcgagccattactctgcggaagaactggcgaaagtgaaaaaaagaaagaccggcaacctgagtaaacgaagccggttaagcgaagttgaccccgatctcattacaaagtaaaggatgtgtaagcctggttttcagattattcatttcgtgtatatttcctgccagacttggttaaacatgcacaggctcaggtaatgattcgcaagtattggtggctcgtcgttttcgctgtcttcgtttttctgtttgatactttactgatgcagtggattgaactgctggcaacagaaacagacaaatgccgcaatatgaacagtgttaatccactaaaactggttaactgtgacgaactgaattttcaggacagaatgtgaatttacatgacacttaattcattcgtttgatgaattaatttcgttatgttttcatctggcatgaacattcttaatacgttatcgaccagagcgggggcttgtttataaagatcataacccgccatattcattaaccagttttgaacaattccgctgaaggcaccatcaataataatcatcacaacatctaaatcgaggttatttgctacacaaccttgttgctgacacgcctgcaatacttcgcggagagtctgcggattaaagcccatcttttcgcgtatcactccctcggccagcatctcatcattaaattcacatttgtgatataagattttcagcaacgcctgctggcggggaattttggcaatatattgcaagccgacaatcaatttttcacgcaattgttgaaacgggtcatgctctaatccagccgtcaagtgttcctggattaactcccgcaaactaggctgttgcaaccacatctcattaaacagttgagtcttgttttcgaagtgccagtagatagcgccacgcgtaacgttagcggcgtcggcaatgtcgttgagcgtcgtcttgcttacgccatgctgcgcaaactgggcgatggcagtttcaatcagttcttgccgggtcttcagagcttcggctttggttctttttgccatgattaattattcaggaaataaatatattcgacacagagtgagaaaatagcgaaggttaatctatcacctaatgtgtatttatacgagaggctaatattgagttgctataaatcgttaaataaataatatatattatttacctaagatacattcactacatcaatatatatttcaatttacgaggttttaattctgcctctttcaacccgcgtcaaaataaaacagtagaatattaatctttttttgtgtttatgtgccttgagatgcctgtattcataactattccttacatcgacgaatgataatttgtaggatagcgaactgtatttttctttctgcgagttaacgcgttgcctttttgggtaaataacgcgcttttggttttttgaggaatagtaatgacgaaacatgccaggtttttcctcctgccctcctttattctgatctccgcggctttaatcgccggttgtaacgataagggagaagagaaagctcacgtcggtgaaccgcaggttaccgttcatattgtaaaaacggccccgttagaagttaagactgaattaccaggccgcaccaatgcttatcgtatagccgaagttcgcccacaggttagcgggatcgtactgaatcgcaatttcactgaaggcagcgatgtgcaagcaggccagtccctgtaccagatcgatcccgcgacctatcaggcaaattatgacagcgcgaaaggcgaactggcgaaaagtgaagccgccgccgccatcgcgcatttgacggtaaaacgttacgttccgctcgtgggtacgaaatacatcagccagcaggagtacgaccaggccattgctgatgctcgtcaggccgatgccgccgtgattgccgcaaaagccacagtcgaaagcgctcgcatcaatcttgcttataccaaagtcactgcgccaattagcggacgtatcggcaaaagcactgtgaccgaaggcgctcttgtcactaatgggcaaacgactgaactggcgactgtccagcagctcgatcctatctacgttgatgtgacccaatccagcaacgattttatgaggctgaagcaatccgtagagcaaggaaatttgcataaggaaaacgccaccagcaacgtagagttggtcatggaaaacggtcaaacctatcccctgaaaggtacgctgcaattctccgatgtgaccgttgatgaaagcaccggctccataaccctacgtgctgtcttccctaacccgcaacatacgcttttgccgggtatgtttgtgcgtgcacggattgatgaaggcgtccaacctgacgccattcttatcccgcaacaaggcgttagccgcacaccgcgtggtgatgcaaccgtgctgattgttaacgataaaagtcaggttgaagcgcgccctgtcgttgccagtcaggcgattggcgataaatggttgattagtgaaggactgaaatctggcgatcaagtcattgtcagcggcctgcaaaaagcgcgtccgggagagcaggttaaagccactaccgatacccccgcagatactgcaagcaagtaaggtaatctgacatggcaaacttttttattcgacgaccgatatttgcatgggtgctggccattattctgatgatggcgggcgcactggcgatcctacaattgcccgtcgctcagtatccaacaattgcaccgcctgcggtttctgttagtgcaaactatccgggcgctgatgcgcagaccgtgcaggatacggtgacgcaggttatcgaacagaatatgaacggtatcgataacctgatgtatatgtcctccaccagcgattccgccggtagcgtgacaattacccttaccttccagtccgggaccgatcctgatatcgcgcaagtgcaggtgcagaacaaactccagctcgccacgccgttgctgccgcaggaggttcagcagcaggggatcagtgttgaaaagtccagtagcagctatttgatggtggcgggctttgtctctgataacccaggcaccacacaggacgatatcagcgactatgtggcctctaacgttaaagatacgcttagccgtctgaatggcgtcggtgacgtacagcttttcggcgcacagtatgcgatgcgtatctggctggatgccgatctgctaaacaaatataaactgacaccggttgatgtgattaaccagttgaaggtacagaacgatcagatcgctgccggacagttgggcggaacgccagcgttaccagggcaacaattgaacgccagcattattgctcagacgcggtttaaaaatccggaagaattcggcaaagtgaccctgcgcgtaaacagtgacggcagcgtggtacgcctgaaagatgtcgcacgggttgaacttggcggtgaaaactataacgttatcgctcgtatcaacggaaaaccggcggcgggcctggggattaagctggcaaccggcgcgaatgctctcgataccgcgaaagccattaaggcaaaactggcggaattacagccattcttcccgcagggaatgaaggttctctacccttatgacaccacgccattcgtccagctttctattcacgaagtggtaaaaacgctgttcgaagccattatgctggtgttcctggtgatgtatctgttcttgcagaatatgcgagcaacgctgatccccgccattgcggtacccgtggtgttgttagggacgtttgccatcctcgccgcttttggttactccatcaacacactaacgatgttcgggatggtgcttgccatcgggctgctcgtcgatgatgcgatagtggtggtggagaacgtcgagcgcgtgatgatggaggataagctcccgccaaaagaagcgacggaaaaaagcatgagccaaattcagggcgcactggtgggtatcgcgatggtgctgagtgcggtatttattccgatggcattcttcggcggttctactggggcaatttatcgccagttctctatcaccatcgttagcgcaatggcgctttctgttctggtggcattgattcttacccctgcgttatgtgcaacgctgcttaaacccgtctctgctgagcatcacgaaaataagggcggtttcttcggttggtttaataccaccttcgatcatagcgttaaccactacaccaacagcgtcggcaaaatcctcggatccacaggacgatatttactgatctatgcgctgattgttgcaggaatggtggtgttgtttttacgtcttccgtcttccttcttacctgaagaggatcagggtgtctttctgaccatgattcagttacccgctggcgcgacgcaagagcggacgcaaaaagtgttggatcaagttacggattactatctgaagaacgagaaagcgaacgttgaaagtgtctttacggttaacggctttagcttcagcggccaggcacaaaacgccggtatggccttcgtcagtctgaaaccgtgggaagagcgtaatggtgacgaaaacagtgcggaagcggtaatccatcgtgccaaaatggaattgggcaagatccgcgacggttttgtcattccattcaatatgccagccattgttgaactgggcacggcaacgggtttcgactttgagttaattgatcaggctgggctgggtcacgatgccctaacccaggcccgtaaccagttgcttggtatggcggcgcaacatcctgccagcttagtcagcgtgcgccctaatggcctggaagacaccgcgcagtttaaactggaagttgaccaggaaaaggcgcaggcattaggtgttagtctttctgacatcaatcagaccattagtacggcgctgggtgggacttacgttaacgacttcatcgaccgtggccgcgtgaaaaagttgtatgttcaggcggatgccaaattccgtatgctgccagaagatgtcgataaactttatgtccgcagcgccaacggcgaaatggtgccattcagcgcctttaccactagtcattgggtgtatggctctccgcgactggaacgctacaacggtctgccgagtatggagattcagggggaagccgcgccaggaaccagttccggcgatgccatggcgttgatggaaaaccttgcgagtaaattacctgcgggcattggttatgactggacgggtatgagctatcaggaacgcttaagcggaaaccaggctcccgctctggtagcaatttcctttgtggttgttttcctgtgccttgctgcactctatgaaagctggagtattcctgtcagcgttatgttggtagtgccgttagggattgtcggcgtgctgctggcggcgacactctttaatcaaaaaaatgacgtctactttatggtgggcttgctaacgacaattggcttgagcgccaaaaacgctattttgatcgttgagttcgctaaagatctcatggagaaagagggtaaaggtgttgttgaagcgacactgatggcagtacgtatgcgtctgcgtcctatcctgatgacctctctcgcctttattctcggcgtattaccgctagctatcagtaacggtgccggcagtggcgcgcagaacgctgtgggtatcggggtaatgggaggaatggtctctgcaacgttgctggcaatcttcttcgtaccggtgttctttgtggtgatccgccgttgctttaaaggataaatcagaaacataaaggcgctttcgggtgcctttattatttccagtgaaacccataaaaattaataagatattcttctgctcactctttaaaagctttctatagttcccgctcccttcactatttttacaattcacataatttgtcattattcattccgcaagatttataacctccggtgataaaatggcattcagctcgttaataagagagttaacttattaagcgttagcgtttattactgaggtaacaccatgaaaagattaattcctgtggcattgctcaccgcattgctggcgggctgtgctcacgatagcccctgcgttccggtttatgacgatcagggtcgtctggttcacaccaatacctgtatgaaaggcacgactcaggataactgggaaacggctggggctattgccggcggggcagctgctgttgctggcctgacgatggggatcatcgctctaagcaaataactgaacagggcgcggagttccgcgctctttttaacgatacagtatctctccataagataaaatattgctatattctgctgggtaattccctgctgatttagcatgttacatcgcgttatttcgctgctttcgaaataacgcatcaatttaattttcacacttcccaccagaaatatactcacgctaacaatcattattctgcttagtaaaacacgcgtaaatattttgcgccaaaatgtggcgcatgtttcattttcgcaccattgcggggcgctgtttttattatttcctgtctacactcagcttattgcgacgcgaaatcgtgcgcaaaagctggcactacttttgcttataagaggatggccacagacaggtaaaagacgtttcccaaacgtcctataacgataattttcgcctcacaggaagcattatgaaaaagatgatgatagccacactggctgccgccagcgtgctgcttgccgttgcaaatcaggcgctgctggcgcgacgcttgatgccgttcagaaaaaaggttttgtgcaatgcgggatcagtgatggattacctgggttctcttatgccgatgctgacggtaagtttagtggtattgatgttgatatttgtcgtggtgttgccgctgctgtatttggtgacgacacgaaagtgaaatataccccgctcactgcaaaagaacgcttcaccgctttacagagtggggaggtggatttgctctcccgtaatacgacctggactagttctcgcgatgccgggatgggaatggcatttaccggcgtcacttattacgacggcattggcttcctgacgcacgataaagcggggctaaaaagcgcgaaagaactggatggcgctaccgtctgtattcaggcgggtactgataccgaactcaacgtcgccgactacttcaaggcaaacaatatgaagtacacaccggtgactttcgatcgctctgacgaaagtgcgaaggcactggaatctggtcgctgcgatacgctggccagcgatcaaagtcaactgtatgccctgcgcatcaaattaagcaacccagctgaatggattgtcttaccggaagttatcagtaaagaaccgcttggtccggtagttcgtcgtggcgatgatgaatggttcagcattgtacgctggacgcttttcgccatgctgaatgctgaagagatgggcatcaattcccagaacgtcgatgaaaaagcggctaatccagcaacgcctgatatggcacatctgctgggtaaagaaggcgattacggcaaggatctgaagctggataataaatgggcctataacatcatcaaacaggtgggtaactacagcgaaatttttgagcgtaacgtaggtagtgaaagcccgctgaaaattaaacgtgggcaaaataatctctggaataacggcggtattcagtacgcaccgcccgtgcgttaagtcggtgtgaggtaacgagcgtcgctacggcggcgctctcttcagcgttatgctttccgaggtttctatgtctcatcgccgcagtaccgttaaaggcagtctctcttttgccaaccctacggttcgcgcctggttattccagatccttgccgttgttgctgttgtcggcattgttggttggttatttcacaacactgtaacgaatctcaataatcgtggcattactagtggttttgcctttctggatcgcggcgctggcttcggtattgtccagcatttgatcgattaccagcagggcgacacctacggacgcgtttttattgtcggcttactcaatacgctactggtttctgcattgtgtattgtgttcgcttctgttttgggcttctttatcggtctggcgagacttagcgataactggctgctacgaaagctttccacaatttatattgagatcttccgtaatattcccccgctgctgcaaatcttcttctggtactttgccgtgttgcgcaatttgcccggaccacgccaggctgtgagcgcgtttgatctggcctttttgagcaatcgtgggctttatattccgagtccgcagctgggagacggatttattgcgtttatcctggctgttgttatggctatagtcctttctgttgggctattccgctttaataaaacataccagataaagaccggacaactgcgccgcacctggccgatcgccgcagtgttgatcattggtttgcctttactggcgcaatggctttttggcgcagcactacactgggatgtcccagccctacgaggctttaacttccgcggcgggatggttttaattcctgaactggcagccttaacgctggcacttagcgtttatacatctgcatttatcgccgagattatccgcgctgggatccaggcagtgccttatggtcaacatgaagcggctcggagtctgggattacccaacccggttacgctacgccaggtcattattccccaggcattgcgggtgattattccaccgttaaccagccagtatctcaacatcgtcaaaaactcctctcttgccgccgctattggctatcccgatatggttagcctgtttgccggcaccgtgctgaatcagacggggcaagccatcgagacgatagccatgaccatgagcgtctatctgattatcagcctgactatcagcctgctgatgaatatctataaccgccgcatcgcgatcgttgaacgctaaggagtcatgatgacaaaagtattgctgtctcatcccccgcgcccggcgagccataacagtagccgcgcgatggtgtgggtgcgaaaaaatctgttctccagctggagcaatagcctgctgactattggctgcatatggttgatgtgggaactgatcccaccgttgctgaactgggcatttttgcaggctaactgggttggcagtacgcgtgccgactgcacaaaagccggtgcctgttgggtcttcatccacgaacgatttggtcagtttatgtatgggctttacccacacgaccaacgctggcgaattaacctcgcattactgattgggcttgtgagcatcgcaccaatgttctggaaaatactcccgcatcgcggtcgctatattgcggcctgggcggtgatttacccactgattgtctggtggctgatgtatggcggtttttttgctcttgagcgggttgaaacccggcaatggggcgggctgacgctaactttaattattgcaagtgttgggattgcgggggcgctaccgtgggggatcttactggcgttaggtcgccgctcccatatgccgattgtgcgtatcttaagcgtcatttttatcgaattctggcgcggcgtgccgctgattaccgttctgtttatgtctagcgtcatgctgccgttgtttatggcagaaggcaccagtatcgacaaattgatccgcgcgctggttggcgtgatcctgtttcagagtgcatatgttgcggaagtcgtgcgaggtggattacaggcgctgcctaaagggcaatatgaagcggcagagagcctggcgttgggttactggaaaactcaggggctggttattctgccacaggcgttgaagctggtaattcctgggctggtaaataccatcatcgcactcttcaaagataccagcctggtgatcattatcgggttgttcgatcttttcagtagcgttcagcaggcaaccgttgatcccgcctggttgggtatgagcacggaagggtatgttttcgccgcgctgatctactggatcttctgtttcagcatgagccgctatagccagtatctggaaaaacgttttaacaccgggcgtacaccgcattgaggacactatgagccaaattttactgcaacctgctaacgcgatgattacgctggaaaacgtcaataaatggtatggacaattccatgttttgaaaaatataaatttaaccgtgcaaccgggagaacggatcgttctgtgtggccctagtggttccggtaaaagcacaaccattcgttgtattaatcatctggaagaacatcaacagggacggatcgtggtagatggcatcgaacttaatgaagatatccgcaatattgagcgcgtcaggcaggaagtgggaatggtctttcagcatttcaatctcttccctcatctgaccgttttacagaactgtaccctggcaccgatttgggtacgcaagatgcctaagaaagaggctgaagatctggcggtgcattacctagagcgggtgagaattgccgaacatgcgcataagtttcccggacagattagtggtggtcagcagcaacgcgttgccattgcgcgtagcctgtgtatgaagccgaaaattatgttgtttgatgagccaacgagcgcgctcgatcctgagatggtgaaagaggtgctggatacgatgattgggctggcgcagagcggtatgacaatgttgtgtgtaacacatgagatggggtttgcacgaaccgtcgctgaccgggtaatttttatggatcgtggggaaatagtggagcaagctgcacctgatgaattttttgcgcatcctaaaagtgagcgtacgagggcatttttaagccaggtaatccattaattgaatgttagttcgaaaagcaaaaaggccatcctttcggatggcctttcgcttgatttgatgtctggcagtttatggcgggcgtcctgcccgccaccctccgggccgttgcttcgcaacgttcaaatccgctcccggcggatttgtcctactcgggagagtgttcaccgacaaacaacagataaaacaaaaggcccagtcttccgactgagccttttgttttatttgatgtctggcagttccctactctcgcatggggagaccccacactaccatcggcgctacggcgtttcacttctgagttcggcatggggtcaggtgggaccaccgcgctactgccgccagacaaattcttttctaatctgccgaactttaacctaaaaagtggtgctgatacccagagtcgaactggggacctcacccttaccaagggtgcgctctaccaactgagccatatcagcacgctaaatttgatgcctggcagttccctactctcgcatggggagaccccacactaccatcggcgctacggcgtttcacttctgagttcggcatggggtcaggtgggaccaccgcgctacggccgccaggcaaattctgttttatcagaccgcttctgcgttctgatttaatctgtatcaggctgaaaatcttctctcatccgccaaaacagcttcggcgttgtaaggttaagcctcacggttcattagtaccggttagctcaacgcatcgctgcgcttacacacccggcctatcaacgtcgtcgtcttcaacgttccttcaggacccttaaagggtcagggagaactcatctcggggcaagtttcgtgcttagatgctttcagcacttatctcttccgcatttagctaccgggcagtgccattggcatgacaacccgaacaccagtgatgcgtccactccggtcctctcgtactaggagcagcccccctcagttctccagcgcccacggcagatagggaccgaactgtctcacgacgttctaaacccagctcgcgtaccactttaaatggcgaacagccatacccttgggacctacttcagccccaggatgtgatgagccgacatcgaggtgccaaacaccgccgtcgatatgaactcttgggcggtatcagcctgttatccccggagtaccttttatccgttgagcgatggcccttccattcagaaccaccggatcactatgacctgctttcgcacctgctcgcgccgtcacgctcgcagtcaagctggcttatgccattgcactaacctcctgatgtccgaccaggattagccaaccttcgtgctcctccgttactctttaggaggagaccgccccagtcaaactacccaccagacactgtccgcaacccggattacgggtcaacgttagaacatcaaacattaaagggtggtatttcaaggtcggctccatgcagactggcgtccacacttcaaagcctcccacctatcctacacatcaaggctcaatgttcagtgtcaagctatagtaaaggttcacggggtctttccgtcttgccgcgggtacactgcatcttcacagcgagttcaatttcactgagtctcgggtggagacagcctggccatcattacgccattcgtgcaggtcggaacttacccgacaaggaatttcgctaccttaggaccgttatagttacggccgccgtttaccggggcttcgatcaagagcttcgcttgcgctaaccccatcaattaaccttccggcaccgggcaggcgtcacaccgtatacgtccactttcgtgtttgcacagtgctgtgtttttaataaacagttgcagccagctggtatcttcgactgatttcagctccacgagcaagtcgcttcacctacatatcagcgtgccttctcccgaagttacggcaccattttgcctagttccttcacccgagttctctcaagcgccttggtattctctacctgaccacctgtgtcggtttggggtacgatttgatgttacctgatgcttagaggcttttcctggaagcagggcatttgttgcttcagcaccgtagtgcctcgtcatcacgcctcagccttgattttccggatttgcctggaaaaccagcctacacgcttaaaccgggacaaccgtcgcccggccaacatagccttctccgtccccccttcgcagtaacaccaagtacaggaatattaacctgtttcccatcgactacgcctttcggcctcgccttaggggtcgactcaccctgccccgattaacgttggacaggaacccttggtcttccggcgagcgggcttttcacccgctttatcgttacttatgtcagcattcgcacttctgatacctccagcatgcctcacagcacaccttcgcaggcttacagaacgctcccctacccaacaacgcataagcgtcgctgccgcagcttcggtgcatggtttagccccgttacatcttccgcgcaggccgactcgaccagtgagctattacgctttctttaaatgatggctgcttctaagccaacatcctggctgtctgggccttcccacatcgtttcccacttaaccatgactttgggaccttagctggcggtctgggttgtttccctcttcacgacggacgttagcacccgccgtgtgtctcccgtgataacattctccggtattcgcagtttgcatcgggttggtaagtcgggatgacccccttgccgaaacagtgctctacccccggagatgaattcacgaggcgctacctaaatagctttcggggagaaccagctatctcccggtttgattggcctttcacccccagccacaagtcatccgctaatttttcaacattagtcggttcggtcctccagttagtgttacccaaccttcaacctgcccatggctagatcaccgggtttcgggtctataccctgcaacttaacgcccagttaagactcggtttcccttcggctcccctattcggttaaccttgctacagaatataagtcgctgacccattatacaaaaggtacgcagtcacacgcctaagcgtgctcccactgcttgtacgtacacggtttcaggttctttttcactcccctcgccggggttcttttcgcctttccctcacggtactggttcactatcggtcagtcaggagtatttagccttggaggatggtccccccatattcagacaggataccacgtgtcccgccctactcatcgagctcacagcatgtgcatttttgtgtacggggctgtcaccctgtatcgcgcgcctttccagacgcttccactaacacacacactgattcaggctctgggctgctccccgttcgctcgccgctactgggggaatctcggttgatttcttttcctcggggtacttagatgtttcagttcccccggttcgcctcattaacctatggattcagttaatgatagtgtgtcgaaacacactgggtttccccattcggaaatcgccggttataacggttcatatcaccttaccgacgcttatcgcagattagcacgtccttcatcgcctctgactgccagggcatccaccgtgtacgcttagtcgcttaacctcacaacccgaagatgtttcacttcagagttgcgaaaatttgagagactcacgaacaactttcgttgttcagtgtttcaattttcagcttgatccagatttttaaagagcaaaacttcgcagtgaacctttgcaggtacactctgaagtattttttatttaatcactacagagatggtggagctatgcgggatcgaaccgcagacctcctgcgtgcaaagcaggcgctctcccagctgagctatagccccataacatgtagttaaaacctcttcaaatttgccgtgcaaatttggtaggcctgagtggacttgaaccaccgacctcacccttatcaggggtgcgctctaaccacctgagctacaagcctgtagaggttttactgctcattttcatcagacaatctgtgtgagcactgcaaagtacgcttctttaaggtaaggaggtgatccaaccgcaggttcccctacggttaccttgttacgacttcaccccagtcatgaatcacaaagtggtaagcgccctcccgaaggttaagctacctacttcttttgcaacccactcccatggtgtgacgggcggtgtgtacaaggcccgggaacgtattcaccgtggcattctgatccacgattactagcgattccgacttcatggagtcgagttgcagactccaatccggactacgacgcactttatgaggtccgcttgctctcgcgaggtcgcttctctttgtatgcgccattgtagcacgtgtgtagccctggtcgtaagggccatgatgacttgacgtcatccccaccttcctccagtttatcactggcagtctcctttgagttcccggccggaccgctggcaacaaaggataagggttgcgctcgttgcgggacttaacccaacatttcacaacacgagctgacgacagccatgcagcacctgtctcacggttcccgaaggcacattctcatctctgaaaacttccgtggatgtcaagaccaggtaaggttcttcgcgttgcatcgaattaaaccacatgctccaccgcttgtgcgggcccccgtcaattcatttgagttttaaccttgcggccgtactccccaggcggtcgacttaacgcgttagctccggaagccacgcctcaagggcacaacctccaagtcgacatcgtttacggcgtggactaccagggtatctaatcctgtttgctccccacgctttcgcacctgagcgtcagtcttcgtccagggggccgccttcgccaccggtattcctccagatctctacgcatttcaccgctacacctggaattctacccccctctacgagactcaagcttgccagtatcagatgcagttcccaggttgagcccggggatttcacatctgacttaacaaaccgcctgcgtgcgctttacgcccagtaattccgattaacgcttgcaccctccgtattaccgcggctgctggcacggagttagccggtgcttcttctgcgggtaacgtcaatgagcaaaggtattaactttactcccttcctccccgctgaaagtactttacaacccgaaggccttcttcatacacgcggcatggctgcatcaggcttgcgcccattgtgcaatattccccactgctgcctcccgtaggagtctggaccgtgtctcagttccagtgtggctggtcatcctctcagaccagctagggatcgtcgccttggtgagccgttaccccaccaacaagctaatcccatctgggcacatccgatgacaagaggcccgagggtccccctctttggtcttgcgacgttatgcggtattagctaccgtttccagtagttatccccctccatcaggcagtttcccagacattactcacccgtccgccactcgtcagcgaaacagcaagctgtttcctgttaccgttcgacttgcatgtgttaggcctgccgccagcgttcaatctgagccatgatcaaactcttcaatttaaaagtttgatgctcaaagaattaaacttcgtaatgaattacgtgttcactcttgagacttggtattcatttttcgtcttgcgacgttaagaatccgtatcttcgagtgcccacacagattgtctgataaattgttaaagagcagttgcgacgcggctttcagctcactgtcgcgaggtggcgtatattacgctttcctctttcagagtcaaccctgaatttcaggatttttttctcttcgttgttccgaccatcctgtgaagtgtttcacgttgtcgtctcaacggaggcgcattatagggatcccaattttttgcacaagtatttttttgatctttttttctgtttgttgttttttcaccctttttgctgcaatcgcacacaaaacggtgcttttttgcatactaaaagacttgcacaaggccaataatgcccccaaagtcattagtaaatcatttattgctgaggtaagtatgtctgatgttttacgcccataccgcgatctttttccacaaatcggtcagcgcgtaatgatcgacgatagcagtgtcgtgattggtgacgttcgtctggctgatgatgtggggatctggccgctcgttgtgattcgtggagatgtacattatgtacagatcggagcacgcaccaatatccaggatggcagtatgttgcatgtcactcataaatccagctacaacccagatggcaacccattaaccattggcgaagatgtcactgttggtcacaaggtgatgctccacggctgcaccattggcaatcgagttttggttgggatgggcagtattttacttgatggcgcaatagtagaagatgatgtgatgattggtgcgggtagtctggtcccacaaaataaacggctggagagcggatatctgtatctcggtagccccgtcaaacagatccgcccgttaagtgatgaagagaaggctgggttacgctattccgcgaataattacgtgaaatggaaggacgaatatctggatcagggtaaccagacccagccttgatcatcttcactttgttcctgaattaagttttccgcttcttcttccaggtcccagcgatgctgacgaaaactcgctaaccactgttctggcgtatctccagtaaagcgatacgccagactctcgccagagatcgcgcatgtcagttgcataccattcacgagagcgggaaaacatacacattttttattctcgtcccactcttccctgtccggaaactggatggcctgattcacgcggacaattcctcctgcaattgctttataactggttctacgtcaggcagaacaccgtgccagagaagaaaggcatgagccgcctgtgccaccagcattcctaaaccatcagcattacgcttactgcctcgctgctcacaccatgccagaaaaggagtttttcctttctgatagaacatgtcatagcaataaatgcctggatgaatgaggctactcgggatcgccggaatatcaccactgatgccactggatgttgcattaataatgagatcaaactcatgaccttccagttcgtccatactcaacgcctgaatactgccagtgtgcgcaaacaatttagccaactcttccgcgcgggataccgtccgattagttattgtcaccgcacagtccagggaaaggagtggcagtagtacgccgcgagatgctccaccagcgccgataagcagaatacgtaaaccagggcggataaaagacagacgttccagatcgcttaacaagcctacaccatcggtattgtcacccagcaggcgtccatcttctaaccgcatgagggtattaacagcaccagccaacgctgcccgttcagtaagctcatccgctctggcaaaagcctcttctttaaaaggcaccgtcacattcgcacctttaccaccagcactaaagaaagcgttcagtgtgttgatgaaatcattgatgggtgccaacacgcgcccatagggatgttcaatattcagttgctgagcaaattgctgatgaatgaatgggcttttgctgtgggctatcggattaccaaaaacagcataggtttccattatgttacccctgtcgaaacagttcacccgtcagggcatcgcggatttcactaggatttaaacgcccccccgtttcaccaggcacaaccgggaacgccgcgccaaattgtgcgcgaacttcgtctactgttcgacaaggtggcaatccactcaagttggcactggtagaaaccagcggtttaccataagcctggcacaaagcaaccaccaacggatggtcggtgactcgtacagcaaggctatcaaagcggcccgtcaaccagcgcggtgttgtcgcaggcgcgggaaagacaaaggtgacaggacctggccagcgggaaaaaatggtttcacgctgcacgtcagtcaacatggtgtcatcaatatagggtttaagctgctcgtaatttgctgcgattaaaatcagccccttatcaaccggacgctgttttaactccaacagtcgcatcactgctgtttcgctatcaggatcgcacccaacaccgaaaacggcttccgttggataggcgatgacacgttcttcattgagaacatctatcgcagctgcgatagcgtctctttgcaggttattattcacgttattattccgcgctaaccggctttccacattgtttactggcacaaaagtgttttacaccctgcgcggttttcttttcgatgagtagcggataatgacactcagggcattctccagctatgggtttgaagttaatggcaaattgacactccgggtagcgatcacaagagtgaaatgttttgccataacgggagcggcgctggaccagatggcccgtccgacattgggggcatgtaattgctgtttcgtccggtttatcgataagttcggtatgttcgcattcagggtagttaatgcaaccaataaacataccaaagcgtccctggcgtaataccagatttgcgccacatgcagggcaaacctgcccctccagaactttgacgatatgtccatccgcactagatttcagaggacggacgtagtcacacgccggatactgactgcatccaagaaacggaccgtgtttcccggatcgaataaccagttcagccccgcactttgggcaggactcattattacgcaccgtgaacagtgcacttttcgccataacaacttatgctgaattaaagaaatgattaatgcagcataccttcattcacttcaaagagtaattcttccatttgctggtacgcattttcgcagcccggaatattgaacaacaccatcaggatcacccatttcagatcatccagttcgaactctgcgttatccagcgcgagcactcgctctatcaccatttcacgagtttcaaggttgagcacctgaatctgctcaaggaaaagcagaaacccacggcagctggcatccagtcgttcacactcttccggtgtataaatacgcatggagagaggatcgctggccagttgcatcggttctgccaacccttcctgataatcagcaagtttttccagccatagcagggcattgtagatatcttctcgctcaaaacctgcgtcggtaagatcctgttcaagtttgtcttgatccacacgcaactcagcttctgtgtgaatataggtttcaaacaaatacattagtacgtcgaacatggcatgccctcctcaatcggacatagccgccgggtacagctgcgatccatcctgctaactccagttcgagtagttgagtaactacctctggcacaggttggccggcacgttcagcgacgacgtcaacaggtgttacctcatctcctacgttagccaggagctcaggaaatggcaatgccacgtcttgctgatctggactataaaaactattttcaggggcgtctggcaaccagtgcaatccaaattgcaagttttccagaatttcttccggttccgtcacaagaatcgcaccttgttttattaaccagtgaggcccttcgcttcccggattccctattggacctggcaaggcaaaaacttctcgcccctgctcaagcgcacaacgtgctgtcaccaggctaccactacgcaaagccgcttccaccaccagtacacctttacttagaccactgataatgcgatttcttcgtgggaaattgtaagcaaggggtggaacatcgaggggaaattcgctgacgagagcgcccccctgttcaagcagactggcagccagtcgggcatgacggcggggatgaatggtattaagtccattccccaatacagcaatgctgacgccatttacctgtaaggctgctttatgcgctacaccatcgattccacgcgccagtccactcgtaattgtcactccacgcgtcgccagagtttcgcaaaataatcgtccccatcgctcgccataccaactatgcgcccgactccccactacggcaagctgaaaactatgcagcgcgtgcagttctccttcaacaaacagtgcgccggggtaatctgtcgtcgccagaagttgaggaggataaaattcgctgtccgcaggaattaaatgatggttgggttgctccaaccaacaaagactgctttcgatactctttcgtggaaaactaagaaagcgttgtgcctgccgcaatgtaagccctgtttgctgcaatacaaccgcatcaatatggctctgttttgccacccagtgagcgatacggaccatatcatcgccgtacaagctgctgatactcattaaacgcagccaaatttctgtatcgaccatccttatctccctgccataagcagccttagcaatctttgcgattggtcagtgatgctgtcaatcagagggggatttgtctagaatagaagaaataatctttctaactcctgaacacatctctggagatttatgagcgttttgcaagtgttacatattccggacgagcggcttcgcaaagttgctaaaccggtagaagaagtgaatgcagaaattcagcgtatcgtcgatgatatgttcgagacgatgtacgcagaagaaggtattggcctggcggcaacccaggttgatatccatcaacgtatcattgttattgatgttagcgaaaaccgtgacgaacggctagtgttaatcaatccagagcttttagaaaaaagcggcgaaacaggcattgaagaaggttgcctgagcatccctgaacaacgtgctttagtgccgcgcgcagagaaagttaaaattcgcgcccttgaccgcgacggtaaaccatttgaactggaagcagacggtctgttagccatctgtattcagcatgagatggatcacctggtcggcaaactgtttatggattatctgagtccgctgaaacaacaacgtattcgtcagaaagttgaaaaactggatcgtctgaaagcccgggcttaaggataagaactaacgtgagtgaaagtctacgtattatttttgcgggtacacctgactttgcagcgcgtcatctcgacgcgctgttgtcttctggtcataacgtcgttggcgtgttcacccagccagaccgaccggcaggacgcggtaaaaaactgatgcccagcccggttaaagttctggctgaggaaaaaggtctgcccgtttttcaacctgtttccctgcgtccacaagaaaaccagcaactggtcgccgaactgcaggctgatgttatggtcgtcgtcgcctatggtttaattctgccgaaagcagtgctggagatgccgcgtcttggctgtatcaacgttcatggtagtctgctgccacgctggcgcggtgctgcaccaatccaacgcagtctatgggcgggtgatgcagaaactggtgtgaccattatgcaaatggatgtcggtttagacaccggtgatatgctctataagctctcctgcccgattactgcagaagataccagtggtacgctgtacgacaagctggcagagcttggcccacaagggcttatcaccacgttgaaacaactggcagacggcacggcgaaaccagaagttcaggacgaaactcttgtcacttacgccgagaagttgagtaaagaagaagcgcgtattgactggagtcttagcgcagcacagcttgaacgctgcattcgcgctttcaatccatggccaatgagctggctggaaattgaaggacagccggttaaagtctggaaagcaagcgtcattgatacggcaaccaacgctgcaccaggaacgatccttgaagccaacaaacaaggcattcaggttgcgactggtgatggcatcctgaacctgctcagcttacaacctgcgggtaagaaagcgatgagcgcgcaagacctcctgaactctcgtcgggaatggtttgttccgggcaaccgtctggtctgatagtccactcttctaagcccggtcttgccgggcgtttttatacttatgaaaaaacaacgtaatttacgtagcatggcggcccaggccgttgaacaagtcgtcgagcaagggcaaagtttaagcaacattctgccaccgctccagcaaaaagtttccgataaagacaaagcacttcttcaagagttgtgctttggcgtactgcgtacgcttagccagttagactggctgattaataagttaatggcccgtccgatgaccggcaaacagcggaccgtgcattacctgattatggttggtttgtatcaactgctttatacccgcattccacctcatgctgcgctggctgaaacggttgaaggcgctatcgcaattaagcgtccgcaacttaaagggttgataaacggtgtattacgccagttccagcgtcagcaagaagagttattagccgagtttaatgccagtgatgcacgttatctgcatccttcctggttgctgaagcgtctgcaaaaagcgtatccagagcagtggcaatccatcgtcgaagccaataaccagcgtccgccaatgtggctgcgtattaatcgtacgcatcattcccgcgacagctggcttgcattgctggatgaagcaggaatgaaaggtttcccgcatgcggattaccctgatgctgtacgtctggaaacacctgcacctgttcatgcgctacctggttttgaagacggatgggttaccgttcaggatgcaagtgcacaaggttgcatgacctggcttgcgccacaaaacggtgaacacattttggatctttgtgccgcccccggcggtaaaacaacgcatatccttgaggtggcaccagaagcgcaggttgttgcggttgatatcgacgaacagcgcctctctcgggtttacgacaatttaaaacgccttggtatgaaggcgaccgtgaaacaaggtgatggccgttacccttctcaatggtgtggcgagcaacagtttgatcgcattttattagatgcgccttgtagtgcaaccggtgtgattcgtcgccatccagatattaaatggttacgtcgcgatcgcgatatcccggaactcgcgcaattgcagtctgaaattctcgacgccatttggccgcatttaaaaaccggtggaactctggtctatgccacctgtagcgtgttaccggaagagaatagcctgcagattaaagcctttttgcaacgtaccgctgatgccgaactttgcgaaacaggaacaccagagcaaccgggtaaacaaaatctacctggtgccgaagagggcgacggcttcttttacgctaagctaatcaaaaagtgatgagataacgggtcgcgactgatgaaaattatcattctgggtgccggccaggttggcggcacactggcggaaaacctggttggcgagaacaacgatattactgttgtcgataccaacggtgagcgtctgcggaccttacaggataaatttgacctgcgggtcgtgcaggggcatggctctcatccacgcgtattgcgggaggcaggtgccgacgacgccgatatgctggttgctgtaaccagtagtgatgaaaccaatatggttgcctgccaggtagcctacagtcttttcaacacccctaatcgcatcgctcgtatccgcagtccagactacgtgcgcgatgccgataagctatttcatagtgatgctgtgccgattgatcatctgatcgcaccagagcagttggttatcgataatatttaccgactgattgagtatcccggcgcattgcaggtggtgaacttcgctgagggtaaagtcagcctggctgtggttaaagcctattatggcggcccgctgattggtaatgcacttagcaccatgcgcgaacatatgccacatatcgatactcgtgtggcagcaattttccgccacgatcgccccattcgtccgcaaggtagcaccattgttgaagctggtgatgaagtgttctttattgccgctagtcagcatatccgcgcggtgatgagtgaattacagcgactggaaaaaccgtataagcggatcatgctggttggtggcggtaatatcggtgcagggctggcgcgtcgtctggaaaaagattacagcgttaaactcatcgaacgtaatcagcagcgcgctgccgaactggcggaaaagttacagaatacgatcgtcttttttggtgatgcgagcgatcaagaactactggccgaagaacatatcgatcaagttgatctgtttattgccgtcaccaacgatgacgaggccaatatcatgtccgccatgcttgccaaacgtatgggtgcgaaaaaggtgatggtattgatccagcgtcgcgcttatgtggatctggttcaggggagcgttatcgatattgcgattagtccacaacaagcaactatttctgcgttgcttagccatgtgcgaaaagcagatattgttggtgtttccagtttgcgccgcggcgtagcagaagctattgaagccgttgctcacggtgatgaaagcaccagtcgcgttgtcggcagagtcattgacgaaatcaagctaccgccaggaacgattattggagcggtggtacgtggaaacgacgtgatgattgccaatgacaatctgcgcattgagcaaggcgatcacgtaattatgttcctcacagataaaaagtttattaccgacgtcgaaagactcttccagccaagccctttcttcttgtaattaataaggcgtctaatgacgccttattatttccctttgattatcaaggattaattaaattcattcctggcaggaaaatggcttaacatttgttagacttatggttgtcggcttcatagggagaataacatgagcattattaaagaatttcgcgaatttgcgatgcgcgggaacgtggtggatttggcggtgggtgtcattatcggtgcggcattcgggaagattgtctctagtctggttgccgatatcatcatgcctcctctgggcttattaattggcgggatcgattttaaacagtttgctgtcacgctacgcgatgcgcagggggatatccctgctgttgtgatgcattacggtgtcttcattcaaaacgtctttgattttctgattgtggcctttgccatctttatggcgattaagctaatcaacaaactgaatcggaaaaaagaagaaccagcagccgcacctgcaccaactaaagaagaagtattactgacagaaattcgtgatttgctgaaagagcagaataaccgctcttaacaagcgccactaagcagaagaccagtggtaaaaaagtgatttactttcttgccactggcctcccagttcccccgattgccatgttttccttttcgcatgtaactgcctttccccttcttatttttctctacgcgctgtcggaataagggatcatgtagtaatgcttctatcgcattatcctttatctgccctttagtatgctgatatcgactcataaaaactccagttggttatttaacggcgcgagtgtaatcctgccagtgcaaaaaatcaacaaccactcttaacgccactcgccccttgttcaagagcttcaagaatgctacaataaacactgctatgagcagtcccacaacaggcatcgttaaggcgttgcaaggaacgctgcatactctgcaactcggctatccgtgcttcgacttcctgcaatctttcctgcacaatgcctttactctcctgacaggtatggtgttcaggatcgatgcggatgctcagcaactcgcggatgctctccagactgaaacctagttgtctggcatggcggataaatttcaatcgctggagatcgctttcggtatataggcgaaacccaccttcagtacgcacttcatgctccatcatctgctgtttttcgtaataacgaatcgtgtcgggtgttacttccgccatttttgccagctcaccaatgcgatacatacatactccattagttatcgttgattttgtccaacaacttgtcagcataatcgccgcgtaaaaaatcggtactcaatccagcttgtcgcagcttcaattccagtaaactcaatcgacggctaacctcttgatattgcggatcatcgtgacggatacctttgagaatatccagaagctgaattgcttctctccgttgctcaagttctggcggtaagcaaccggcattcttcagcaagcgataccccgcacgtaattccggtggcacgtgagaatcatcatccagtatcaatggttcgccgctacctgccaggttatcaaactcacctttcgcttgcgcttctgctatatggcgctctgcccactggtcaagtaaccacataaatactccaggggatgaacaaaaagagtacagctattgtagataagtggggatactacgggtataaaaaaacccgccggggcgggtttttttacgttgcttcagattactctgcagcagcttctgctttctcactacgatcaaccagctcgatgtaagccatcggcgcgttgtcgcctgcacggaagccacacttcagaatacgagtgtaaccaccggcacggctcgcgaaacgcgggcccagttcgttaaacagttttgccacgatctcgttatcacgagtacgggtgaatgccagacgacgattagcaacgctatcagtcttggcaagagtaatcagcggctcaactacgcggcgcagctctttcgctttaggcagagtcgtcttgatgatttcatgacgaaccagactacctgccatattgcggaacatagcctggcgatggctgctgttgcggttcagttgacgaccactcttacgatggcgcatgaccttatccttctcagtaaaaccttaacctgtgattcggttactcgtcagcgatgcttgccggtggccagttttccaggcgcatgcccagagacagtccacgggaagccagcacgtctttaatctcagtaagagattttttaccaaggttaggcgttttaaggagctcaacctcggtacgctgtaccagatcaccgatatagtggatagcttctgctttaaggcagttagcagagcggacagtcaattccagatcgtcaacagggcgcagcaggatcggatcgaactctggtttctcttctttcacttcaggctgacgtacatcacgtaagtcaacgaaagcttccagttgttcagccagaatggttgccgcacgacgaatcgcctcttcaggatcgattgtgccgttggtttccatttcgatgaccagcttgtccaggtcggtacgctgttctacacgcgctgcttcaacattgtaggcaatacgctccacagggctgtagcatgcgtcgaccagcagacggccgattgggcgctcatcttcttcgctatgaattcgggtagaagccggcacataaccacgaccgcgctgaactttgatacgcatgctaatagacgcgttctcatcggtcaggtggcagatcacgtgctgcggcttgacgatttcgacatcaccgtcgtgggtgatatcggctgcagtcacagggccaatgccagatttattcaaggtaagaataacttcatctttgccctgaactctcaccgccagccctttcaggttgagcaggatttccaggatatcttcctgaacgccttctttggtgctgtactcatgtagtacaccatcaatctcaacctcggtcaccgcgcaacccggcatgctactgagcagaatacggcgcagtgcgttacccagagtatggccaaagccacgctctaaaggctcaagggtcaccttggcgtgcgtgctactcacttgctcgatatcaaccaggcgcggttttagaaactctgtcacagaaccctgcattgtgtcctctctttggtactaagctttacttggagtaaagctcgacgatcaggtgttcgttaatgtccgcagacagatcagaacgctccggcttacgcttaaacgtaccttccatcttgccagcatcaacttccagccaggttggcttttcacgctgctcagccagctccagagcggctttcacgcgagactgcttcttcgctttctcacgaatgcttacaacgtcattcggactaacctgataagaagcgatgttaacaacacgaccgtttaccataattgctttatggctaaccagctgacgtgcttctgcacgagtggcaccgaagcccatacggtatacaacgttgtccagacgaccttccagcagagccaacaggttttcaccggtgttgcctttcagacgtgctgcttctttgtagtagttacggaactgacgctccagcacaccatagatacggcgaactttttgcttttcacgcaactgcacaccatagtcagacagacgcggtttacgcgcaccgtgctggccaggagcttgttcaattttacacttggtatcgatcgcgcgaacgccagacttaaggaataagtcggtgccctcacgacggctcagcttgagcttaggacccaaatatcttgccattttctttctccaacaaacctggaaaacgaggcgttatacgcgacgttttttcggcggacgacaaccgttatgagggatcggagtcacatcagtaatgttagtgatgcggaaacctgcggcgttcagagcacgaatagtagattcgcggcctggacccggacctttaaccataacttccagattcttgatgccgtattctttcacggcgtcagcgcaacgctctgctgcaacctgagctgcaaacggagtggatttgcgagaaccacggaaaccggaaccaccggctgttgcccaacccaacgcgttaccctgacgatcagtgatagtcacgatggtgttgttgaaagaagcatggatatgagccacgccgtcagagacttgttttcttacacgtttacgtgcacgaattggtgcctttgccattattcaatcaccccgattatttcttgatcggtttgcgcggacccttacgggtacgtgcgttggtcttggtacgctgaccgcgaaccgggagaccacgacgatgacgcaaaccgcgatagcaaccaagatccatcaggcgcttgatgctcatgctgatttcacggcgcagatcaccttcaacgacaaatttggcaacttcgtcacgcagcgtgtcgatttgtccttcagacagctcactgatcttaacatcttcagcgatacccgctgcagccaggatggctttagaacgggtcttgccgacgccataaatgctagttaatgcgattacggcatgcttatgatcaggaatgttaatgcctgctatacgggccactatgcactcctactatttaatatgtacgttccatgctgaaaagcccgttttcaggatactcaaatggaaacgcacagacatacaaaagattggctggctaatctagccagctcaacccaactttgcaagaaaaatatgcgaaaaaatcagccttggcgctgtttatgcttcggctcggcactgcaaatcacacggatgacaccatcacgcttaacgattttgcagttacggcataatttcttgacggaagcacgaactttcatttttactctccgtaacttctcgggcgaccaattatcggccgtagcctttcaggttcgccttcttcaatgcagactcatactgactggacatcatcagagtttgcacttgagccataaagtccataatcacgacaacaacgataagcagactggtcccaccgaagtagaacggtactttcattgcatcacgcatgaactccgggatcaggcagataaaggtaatatacagcgcaccaaccagggtcaggcgggtcattactttatcgatatacttcgccgtttgctctcccggacgaattcctggtacaaatgcaccggacttcttcaggttatctgctgtttcacgcgggttgaaaaccaacgccgtgtagaagaaacagaagaagatgattgcagacgcatagagtaacacataaagcggttgcccaggctgcaaatacaggctaattgttgtcagccagttccaaccagtaccgcccccgaaccaactcgcgatggtcgccgggaacagaataatactggaagcgaagattgccgggattacccccgccatattcactttcagcggtaaatgtgtgctctgtgcagcatagacacgacgaccttgctgacgtttcgcgtagtttaccacaatgcggcgttgaccacgctcaacaaatacaacaaagaacgtcactgcaaatactaatactgcaaccaacagcaacacgaggaagtgcaggtcgccttgacgcgcttgctcgatagtatgggcaatggctggcgggagtcccgcgacaataccggcgaagataatgatactaataccgttgccgatacctcgttcagtaatctgttcgcccaaccacatcaggaacatggttcctgtgaccagacttacaacagcggtgaagtagaatgcaaagcccgggttaatcaccaggccttgcataccaggcatattcggcagaccggtagcaataccgatgctctggaatattgccagcaccagagtaccgtagcgggtgtactggctgatcttacgacgaccagactccccttctttcttaatttctgccaacgttgggtgaaccaccgtcagcagctggataatgatgctcgcgctaatatacggcatgatccccagagcaaagatagaagcacggctgagagcaccaccagagaacatgttaaacatctcaatgatggtgcctcgctgttgctcaagcagtttggcaagtacagcggcatcaataccagggatcggaataaaagagccaatacggaacacaatcagcgcaccgataacaaacagcagtctgcgtttcagctcgcctaagccacctttggcactttgaaaatctaatcccggttgtttagccatctgctacttattcctcgattttaccgccagcagcttcgatagcagcacgagcgcctttagtaacacgcaggccacgaacagttaccggagtcgttacttcgccagccaggatcactttcgcgaactcgatctggataccgataatgttagccgctttcagcgtgttcaggtctactacaccgccttctactttagccaggtcagacagacgaatttcggctgtaatcgctgctttacgagaagtgaagccgaatttcggcagacgacggtacagaggcatctgaccaccctcgaaaccgcgacgtacgccaccgccagaacgagacttctgacctttgtgaccacgaccaccggttttaccgaggccagaaccgataccacgacccaggcgtttacccgcctttttggagccttcggccggagacagagtatttaaacgcatctcttactcctcaactttaaccatgaaggaaaccgcgttgatcataccgcgaatagcaggagtatcctcgcgctctacggtgtgaccaatacgacgcagacccaggccaagcagcgttgccttgtgtttcggcagacgaccgattgcactgcgggtttgagtaattttaatagtctttgccatggtttatttccccagaatttcttcaacggatttaccacgcttggcagcgaccatttctggagaattcatattttccaggccatcaatagttgcacgaaccacgttgatcgggttggtggaaccataggctttagccagaacgttatgaaccccagcgacttccagaacggcgcgcattgcaccaccggcgatgataccggtaccttcggaagccggctgcatgaatacgcgagaacccgtgtgaacacctttaacagggtgttgcagagtgccgttattcagcgcgacgttaatcatattgcgacgggctttttccatcgctttctggatcgctgctggaacttcacgcgctttaccgtaaccaaaaccaacgcgaccgttaccatcgccaactacagtcagagctgtgaaggagaaaatacgaccacctttaacggttttagatacgcggtttaccgcgatcagcttttcctgcagttcgccagcttgtttttcgatgtgagccatcttacacctctaccttagaactgaaggccagcttcacgggcagcatctgccagtgcctggacacgaccatgatattggaacccggaacggtcaaaggatacatctttgatgcctttttccagagcgcgttcagcgacagctttacccacagctgcagccgcgtctttgttaccggtgtacttcagttgttcagcgatagctttttctacagtagaagcagctaccagaacttcagaaccgttcggtgcaattacctgtgcgtaaatgtgacgcggggtacgatgtaccaccaggcgagttgcgcccagctcctggagcttgcggcgtgcgcgggtcgcacgacggatacgagcagatttcttatccatagtgttaccttacttcttcttagcctctttggtacgcacgacttcgtcggcgtaacgaacacccttgcctttataaggctcaggacgacggtaggcgcgcagatccgctgcaacctggccgatcacctgcttatcagcgcctttcagcacgatttcagtctgagtcggacattcagcagtgatacccgcaggcagctgatggtcaacaggatgagagaaacccagagacaggttaatcacattgcctttaaccgctgcacggtaacctacaccaaccagctgcagcttcttagtgaagccttcggtaacaccgataaccatactgttcagcagggcacgcgcggtaccagcctgtgcccaaccgtctgcgtaaccatcacgcggaccgaaggtcagggtattatctgcatgtttaacttcaacagcatcgttgagagtacgagtcagctcgccgtttttacctttgatcgtaataacctgaccgttgatttttacgtcaacgccggcaggaacaacgaccggtgctttagcaacacgagacattttttcctccgattaggctacgtagcagataatttcgccaccaagaccagcctggcgcgctgcacgatcagtcataacacctttagaggtagaaacaactgcgatacccagacccgccataactttcggcagctcatctttacgtttatagatgcgcagacctgggcggctgacacgctgaatgctttctacaacagctttgccctggaaatacttcagagtaagttccagttcaggcttggtgtcgccttcaactttaaaatcttcaataaaaccttcttccttcagcacgttggcgattgccactttcagcttggaggaaggcatggtgaccgcagctttgttcgcggcctgaccgttacggatacgggtcagcatatccgcgatcggatcttgcatgctcatctgtctttactcccgtgattcaattggtgacaattaccagctagcctttttcagacccgggatttcaccgcgcatagcggcttcacggaccttaatacggctcaacccgaacttccgcaggaaaccatgcggacgacctgtttgacggcagcggttacgctgacgagacgggctggaatcacgcggcagagtctgcagcttgagaacagcgttccaacgatcttcgtcggaagcgttcacatcagagatgatcgctttcagttcagcgcgtttcgcgaagtatttatcagctaaagctacgcgttttacttcgcgtgctttcatactttgcttagccatttagtaaccctaccttacttgcggaacgggaagtcaaaggcagccagcagagcgcggccttcttcgtcagatttcgcagtagtggtaatggtaatatccaaaccacgaacgcggtcgactttatcgtagtcgatttctgggaagatgatctgctcacggacacccatgctgtagttaccacgaccgtcgaaagacttagcggacaggccacggaagtcacggatacgaggtacagcaatagtgatcaggcgctcaaagaactcccacatgcgttcgccacgcagagttactttacagccgatcggatagccctgacggattttgaagcctgcaacagatttgcgtgctttggtgatcagcggtttttgaccggagattgctgccaggtctgctgctgcgttatccagcagttttttgtcagcgatcgcttcaccaacacccatgttcagggtgatcttctcgacccgagggacttgcatgacagaattgtagttaaactcagtcatgagttttttaactacttcgtctttgtagtaatcatgcagtttcgccatcgtactactccaaattacttgatagtttcgctgttagacttgaagaaacggacttttttaccgtcttcgaatctaaagcctacacggtcagccttgccggttgccgcattgaagattgctacgttggaaacctgaatagcggcttctttttcaacgatgccacccggttggttcagggccggaaccggcttctgatgtttcttaaccaggttgataccttcaacaatgaccttgccggaagacaggacattcttaactttaccgcgtttacctttatctttaccggttaacacgataacttcgtcatcacgacggattttcgctgccatgattcgctccttagagtacttctggtgccagagagataattttcatgaacttctcactacgaagctcacgagttaccggcccaaaaatacgcgtaccgataggctgctcgctgttgttgttcagaagaacacaagcattaccatcgaagcgaatgacagaaccgtccgggcgacgaacacccttcttggtgcgcaccactaccgccttcagcacatcaccttttttgaccttaccacgcggaattgcttctttgatggtgatcttgatgatgtcgcctacgcctgcgtagcgacggtggctgccacccagaaccttgatacacattacgcgacgtgcaccggagttgtcggcgacgttcagcatagtctgttcttggatcattttagtgctccgctaatgtcaactactactgagacccgaaaatcaggtcgttaaaaatccccatatcgagggcgcggcattataacaccgcttcaaggatatgggtagaaaaaataaacggctcatttctgagccgtttattcgtattgagagagtgtactgtattacagaaccgctttctctacaacgcgaaccagcgtccaggatttagtcttggacagcggacggcattcgcggatttcaaccacgtcaccgataccgcattcgttgttctcgtcatgtacgtgcagtttggtcgtacgcttgatgaatttaccgtagatcgggtgtttcacaaaacgttcgatagcaacaacaatggatttctccattttgtcgctaacaacgcgaccttgcagagtacggattttatcggtcattacgcacccgccttctcgttcagtaaagtcttaacgcgtgcgacatcgcgacgcacttgcttcaacaggtgagactgttgcagctggccacttgcagcctgcatacgcaggttgaactgctcacgcagcaggttcagcagctcggtgttcagctcttcaacgctcttctcacgcagctcttttgctttcattacatcaccgtcttagttacaaaggtggttttaatcggcagtttcgctgctgccagcttgaatgcttcacgggccagctcttccggaacaccgtccatttcatacaggactttacccggctgaatcaaggcaacccaatactccacgttacctttacctttacccatacgcactgccagcggcttttcagtgatcggtttgtccgggaacacacggatccagatcttaccttgacgcttaactgcacgggtcatagcacgacgtgctgcttcgatctgacgggcagtcagacgaccacggccaacagctttcagaccgaagctgccgaagctaacatccgtaccctgcgccagaccgcggttacggcctttgtgcattttacggaattttgtacgctttggttgtaacatcagcgacgctccttatttacggcctttacgctgctgctttttaggctgagcagccggtttttccggttgttcaacagcagccataccacccaggatctcgcctttgaagatccacactttaacgccgattacaccgtaagtggtgtgcgcttcagaggtgttgtagtcgatgtcagcacgcagagtgtgcagcggtacgcgaccttcgcggtaccattcggtacgtgcgatttccgcgccgcccagacggccgctaacttcaactttaatacctttagcgcccagacgcattgcgttctgtacagcacgcttcatagcacgacggaacataacgcgacgttccagctgagaagtgatgctgtcagcaaccagttttgcgtccagttcaggcttacgaacttcggcgatgttgatctgtgcaggaacgccagcgatgtccgctacgaccttacgcagtttttctacgtcttcaccttttttaccgataacgatacccgggcgagcagtgtgaatggttacacggatgctcttagccggacgctcgataacgatacgagatacggacgctttagccagttccttagtcaggtactgacgtactttaaaatcgctgtccaggttgtcagcgaattctttggtgttcgcaaaccaggtagagttccatggttttacaatacccaggcgaataccattaggatgtactttctgacccattgctagtctccagagtctcagcgatcggacacaaccacagtgatgtggctggtgcgcttcaggatgcgatctgcacgaccttttgcacgcggcataatgcgcttcatgctcgggccttcgtctacgaaaattttcgtaactttcagatcgtcaatgtcagcgccatcgttgtgttcagcgttagcaatggcagattccagaactttcttgaccagtacagccgctttcttgttggtgtaggtcaaaatatccagagcctggctcactttcttaccgcgaatcaggtcagcaacaaggcgaaccttctgagcagaagaacgagcatggcgatgtttagcgatagtttccatctcttcctcctaccttatttcttcttcgcttttttatcagcagcgtggccgcgataagtacgagtcggtgcgaattcacccagtttgtgaccaaccatttcgtcggttacaaataccggaacgtgctgacgaccattatggacagcgatggtcaaaccgatcatgttaggaaagatcgtactacgacgggaccaagtgcgcaggggcttcttgtctccgctttccaccgctttctctaccttcttcagcaagtgcaggtcaataaaaggacctttcttgagagaacgtggcatggcttatcctctaaaattatttgctacggcgacgtacgatgaatttatcagtacgcttgttgctgcgggtcttcttacctttggtctgaacgccccacggagttaccgggtgcttaccaaagttacgaccttcaccaccaccatgtgggtggtctaccgggttcatcgcggtaccgcgaacggtcggacgaacaccacgccagcgtgcagcacctgctttacccagaacgcgcagcatatgctcagcattgccaacttcgcccagagttgcacggcagtctgcttctactttacgcatttcaccagaacgcagacgcagggtgacataagcaccatcacgagcaacgatctgaacgtaagtaccagcggaacgtgccagctgaccgcctttacctggtttcatttctacgttatgaacagtagaaccaaccgggatgttgcgcatcggcagggtgttacctggtttgattgcagcatcaacgccagactgaatctggtcgccagctttcaggcctttaggggccaggatgtaacggcgttcaccgtctttgtacagaaccagcgcgatgttcgcggaacggttcggatcgtactcaagacgttcaacaactgccgggataccgtctttgttgcgtttgaagtcaacaatacggtaagcctgcttgtggccaccaccgatatgacgagtggtgatacggccattgttgttacgaccaccggatttgctgtttttttccagcaacggagcaaaaggtttgcccttgtgcagctcagggttaaccactttaactacgtggcgacgacccggagatgtcggtttacatttaacaactgccattgtattactcctccgacttactcagcgccgccaacgaagtccagattctggccttctttcagggtgacgtaagcttttttccagtcgctacgacgaccgatacgctgtccgtgacgtttaactttccctttaactaccagggtgttaacgacttcgacttcgacttcaaacagtttctgcacagcagctttgatttctgctttggtcgcgtctttagcaactttgagtacgatggtgttggatttttccatcgcagtagacgctttttcagaaacgtgcggtgcacgcagcaccttcagcagacgttcttcacgaatcatgccagcatctcctcaacttgcttaacagcatcagcagtcattacgactttgtcgaaggcgatcaggctaaccgggtcgataccagttgcatcgcgtacgtcaaccttgtgcaggttgcgcgcagccaggaacaggttttcgtccagctcaccggtgatgatcagcacatcttccagagccatgtctttcagtttctgtgccagcagcttagttttcggcgcttctacagagaacttctcgacaacgatcagacgatcctgacgtaccagttcggacaggatgcttttcagcgcgccgcggtacatcttcttgttaactttttgactgtggtcctgcggacgagcagcaaaggtcacgccaccagaacgccagatcgggctcttgatagaaccagaacgcgcacggccggtgcctttctggcgccacggttttttaccggaaccagttacttcagcacgagtcttctgagcacgagtaccctgacgagcaccagctgcataagcaacaacaacctggtgaaccagcgcttcgttgaaatcacgaccgaaggtagtttcggaaacagtcagcgcgctctgcgcgtctttcaatactaattccattgctatctccttacgccttcacagctggtttaacgatcaggtcgctaccggttgcacccgggacagcacctttaaccagcagcaggttgcgctcagcgtcaacgcgtactacgtcaaggctctgaacggttacacgttcgttacccatctgacctgccattttcttgcctttgaacactttgcccggagtctggttctgaccgatagaacccggaacgcggtgagacaaggagttaccgtgagtagcgtcctgggtacggaagttccagcgcttaacggtacctgcgaaacctttacctttagaggtgccagttacgtcaacttttttaacgtcagcaaacagttcaacgctaatgctctgacctacagtgaactcttcgccttcagccaggcggaattcccacagaccacggccagcttctacgccagctttagcgaagtggccagcttcaggcttggtcacacggttagcttttttagcaccggtggtcacctgaatagcacggtagccatcgttagccaggtctttaacctgagtaacgcggtttgcttcaacttcgattacggttactgggatagaaacgccgtcttctgtgaagatacgggtcatacccacttttttaccgactaaaccaatcattgtttcaacctctcaatcgctcaatgacctgattaacccaggctgatctgcacgtctacaccggcagccagatccagacgcatcagagcatcaacggttttctcggttggctcaacgatgtcaaccagacgcaagtgagtacggatttcgtactgatcgcgcgcgtctttgttgacgtgcggggagatcagaacagtgaagcgctctttgcgtgtcggcagcgggatcggaccacggacctgcgcaccagtgcgcttggcagtctcgacgatttccgcggttgcttgatcgatcagacgatgatcaaacgctttcaggcggatacggattctttggttctgcatgagaccagagctccaattattttataaacgaaaatgattactcctcagacccattacgattgatgggagagtgtaaccgttcttacgtagctccccgattgggagcattgttaggtagccaaattcggctaactgaggttcagattgaacctgctgtcaactacgacaagcccgcgcattatacatacttaaccaccgaacgcaagcgtattgctagtaaagtaaacagccttcgggttatctctcaagttcgttcagtgcatttttgacacgctctcttaaaccggctttctcttcgctttcttccacagtattttcttcgtcttcagaagaagagggggcattctcaaccgcgacgcctgggtcatcttcctcctcgacggattcgacgacggggagtggctgttttttgaagaaatagtgttgtgtactttgtttaaaagcgggcgtttcagcctctacagtgacttcggcttttactatccaaagcacccatagctgcctggcatacccaccaaccagcaccattcctgcaaaccacaggcaaatcagtaataaacaaattacatatattatggtgctgtgtttttgtcgggagaagataccagggtgacctgtttctttctgctcacgcgcggcgatatagaattcaaacattataatcccttgtgacgtaaaaactgcaaaacaaaagtcctacgcaggaattatttacgttttacgagaacccttcaatatgaattaaattacggcattaaaaataagaaaaaagcctgacaaatgaagcattttaaaaacagaaacattcatatttaaaatgttaaattgaattgatattttaaatatgaataatttattcgttctgacagtacgaataagatatgccgtcaacaaatgcaaaaagggcgccgaagcgcccttttcaattcaaaactaattaacgtgtaattagcccagaactttagcaacaacgcccgcgccaacggtacggccgccttcacggattgcgaaacgcagaccgtcgtccatcgcgatcgggtggatcagggtaacaaccattttgatgttgtcgcccggcattaccatctctacgccttccggcagttcgatggtaccagtcacgtcagtagtacggaagtagaactgcggacggtagcctttgaagaacggagtatgacggccgccttcatctttggacagaatgtacacttcagattcgaacttggtgtgcggcttgatggtgcccggcttagccagtacctgaccacgttcgatttcttcacgtttgataccacgcagcagaacacctacgttctcaccagcacggccttcgtccagcagtttgcggaacatttcaacgccagtacaggtagacttctgagtctctttgataccaacgatttcaacttcttcaccaactttgatgataccgcgttctacacgaccggtaacaacggtaccacgaccggagatggagaatacgtcttcgatcggcagcaggaacggcttgtcaatcgcacgctctggttccggaatataagaatccaggaagccagccagttccaggattttcgcttcccactctgcgtcgccttccagcgctttcagagcagaaccacgaacgatcggagtgtcgtcgcccgggaagtcgtactgagacagaagttcacgaacttccatttcaaccagttccagcagctcttcgtcatcaaccatgtcgcatttgttcaggaacacgatgatgtacggaacgcctacctgacgacccagcaggatgtgctcacgagtctgcggcatcgggccgtcagtcgcagcaactaccaggatcgcgccgtccatctgagcagcaccggtgatcatgtttttaacatagtcggcgtgccccgggcagtctacgtgtgcgtagtgacgggtcggggtgtcgtattcaacgtgagaagtgttgatggtgataccacgagctttttcttccggcgcgttatcgatctggtcgaatgcacgagcagcaccgccgtaggttttagccagtacggtggtgattgcagcggtcagagtagttttaccgtggtcaacgtggccgatagtaccaacgttaacgtgcggttttgtacgttcaaatttttctttagacacggctatattccttactatagtgctctccccttcaggagagagcacgggactttggtattaacccttaggcttatttaccacgggcttcaattacggcctgagcaacgttactcggcgcttcatcatacttcaggaattccatagtgtaacttgcacgacctttggtcagagaacgcagctgagttgcgtatccgaacatttcagacagcggtacttcagcgtggatcttaacgccagtaacttcagattcctgacctttgagcataccacgacgacggctcaagtcaccgataacgtcaccggtgttctcttccggagtttctacttcaaccttcatgatcggctcaagcagaactggtttcgctttcttaaagccttctttaaaggcgatagaagcagccagtttaaacgccagttcagaggagtcaacgtcatggtaagaaccgaagtgcagacgaatacccatgtctactaccgggtagcctgccagcggacctgctttcagctgttcctggatacctttatcaacggccgggatgtattcgccagggattacaccacctttaatgtcgttgatgaactcgtagcctttcgggttactacccggctccagcgggtacatgtcgataacaacatgaccatactgaccacgaccaccagactgtttcgcgtgtttaccttcaacatcggtaactttctggcggatagtttcacggtaagcaacctgcggtttacctacgttcgcttcaacgttgaattcacgcttcatacggtcaacgatgatgtcgaggtgcagttcgcccatacccgcgatgatggtctggttagattcttcgtcagtccatacacggaaagacgggtcttctttagccagacggcccagagccagacccattttttcctggtcagctttggttttcggttcaactgcgatggagattaccggctcagggaattccatacgttccagaatgatcggcgcatccgggtcacacagggtgtcaccagtggttacgtctttcagaccgatagcagcagcgatgtcgcccgcgcgaacttctttgatctcttcacgtttgttagcgtgcatctgaacgatacgaccgaaacgctcacgtgcagctttcacggagttcagtacggtatcaccagagttaaccacaccggagtaaacacggaagaaggtcaggttaccaacaaacgggtcggtagcgattttgaacgccagtgcagagaacggctcgtcatcacttgcgtgacgttcagccggagtgtctttaccgtcgtccaggataccgttgatcgcaggtacgtcaaccggggatggcaggtaatcaattaccgcatccagcatcgcctgaacacctttgttcttgaacgcagaaccacaggttaccaggatgatttcgttgttcagaacgcgctgacgcagagcacctttgatttctgcttcagtcagttcttcaccacccaggtatttttccatcagctcttcagaagcttcagctgcggattcgatcaggttctggtgccattcgttagccagttcaaccatgtctgccgggatatcttcgtattcgaaggttacgccctggtcagcgtcgttccagttgatagctttcattttcaccaggtcaacaacaccggtgaaatgttcttcagcaccaatcgccagctgcagcggaaccgggttcgcgcccagacgggttttgatctggttaacaactttcaggaagttcgcacccatgcggtccattttgttaacgaacgcaatgcgcggaactttatatttgtttgcctgacgccatacggtttcagactgcggctgaacaccaccaactgcgcagtaaaccattaccgcaccatcgagaacacgcatggaacgttctacttcgattgtgaagtcaacgtgccccggggtgtcgatgatgttgatgcgatgcggctcatactgcttagccataccagaccagaatgcagtagtcgcagcggaagtgatggtaataccacgttcctgctcctgctccatccagtccatggttgcagcgccgtcatgaacttcaccgattttatggtttacaccggtgtagaacagaatacgttcggtagtagtggttttaccggcgtcgatgtgcgcactgataccgatgttacggtagcgtgcgatgggtgttgtacgagccatttgtttcctcgtttatcttttaggcgttcaatttaagtagcccaaagcgggctgcttactggaagcgcccgcctggtgactaaaactccgaagggataaccaacggtagtgtgcgaacgccttgttggcttcggccatacggtgaacgtcttcacgtttcttaactgcagtacctttgttttctgcagcatcagaaagttcgttcgccaggcgcagagccatggatttatcaccgcgtttacgagcagcttcaacgatccaacgcattgccagagcattacgacgaaccggacggacttcaactggtacctgataagtagaaccaccaacgcggcgagacttaacttctacagtcgggcgcacgttttcgagagctacttcgaatgcttccagttcagatttaccagagcgctgagccagggtctccagcgcgctgtatacgatagattcagcagtagattttttaccatctaccatcaggatatttacaaatttagccagcagttcacttccgaacttcggatccggcagaattttacgctgaccaatgacgcgacgacgtggcatggaaatactccgttgttaattcaggattgtccaaaactctacgagtttagtttgacatttaagttaaaacgtttggccttacttaacggagaaccattaagccttaggacgcttcacgccatacttggaacgagcctgcttacggtctttaacgccggagcagtcaagcgcaccacgtacggtgtggtaacgaacacccgggaggtctttaacacgaccgccacggatcaggatcacggagtgctcctgcaggttgtgaccttcaccaccgatgtaggaagtcacttcgaaaccgttagtcagacgaacacggcatactttacgcagcgcggagttcggtttacgaggagtggtagtatatacacgagtacatacgccacgtttttgcgggcatgcttccagcgcaggcacgttgcttttcgcaactttgcgagcacgtggtttgcgtaccagctggttaactgttgccattaaatagctcctggttttagcttttgcttcgtaaacacgtaataaaacgtcctcacacaatatgaggacgccgaattttagggcgatgccgaaaaggtgtcaagaaatatacaacgatcccgccatcaccaggccatctggctggggtgcttaaccgtaagtctgacgaaatcagtatagtcaatgagaatgatgtcgttgctaatttgaccagtcaaaccgcgggcaataaggtcttcgttcagggcatagaccttaatgggggcattacgcagactttcaaggtagcggttaccgtcaactgcggcagttacgccatcttgcaataatagcagttcgtctccttcactgagcagacgcagcagcgcagcaaaatccgtcagccagggactgcgatgtaatgtgtgcagcataaacgcctcaaaacctcaaaataacatcgtagttggcgagttcgcggcgtaaggcatctgcttcgagcggcgtggcttcgacaacaaagggtgtctgcggatctaacccgcgttcgcgcagactagccgcacaaacccagcactgttcaatgtcgtacagacccaacaatttaaaagtggcaatgtaatcacgcgccagcactgcatcgggcttttgtcctggcagcagctgaaaaacgccatcagctataaagaagacagccagatcgtcagttaatgcggaagttgccagtaaagcatctaaaccttcccggcctgcggctgtaccatgaggtgcagtagaaaaaacaaacgcaattcgtttcatcagaactgtaccaccctgtcacaggtcaggctggcttccgccagcgccccaagtccgcttaaggtaaatccctgctgaaggttactgctagccagccccagtcttccggcctccgtttcatcaacaacgccacggcgtaatgctgccgctacgcagatattcagcgccacaccatgttgcgcattcagttgttgccaggcccgtacgaggtcaaattcgtcacttgccggagaggtcaattggttagcgttatagaccccttcccgatagaaaaagacgctgcttaactcatggccatctgctatcagcgcctgcgcaaactgaaaagcactactcgcctgttgcgtaccgtatgctggcccggtcaccacgatggcaaaacgcattacttatcttgcccctggaaatcaccgctcttgaactggcggatgtagagatagacagtgtgtttggagatgttcaggcggtcagcaacctggttgatcgcatctttaatatcgaagatccctttctcgtagagattcagcacgatctgacgatttttggcgttattagaaacattgcgatcggcattcacttcttcgatggtgaactccagcgtttgggtaaccagatcttcaacagaagaggcaaagttgacgctactaccgacatccggggtttctggcggcacaaaggtgctcataatctggctgaagggaacatcaagattcatattgatgcacagcagaccaattacacgctgttcgcggttacgaatcgcgatagtcagggacttcattaatacgccgcttttggcgcgagtaaagtagcatttagaaacgctgctatccgctcccgtcatatcgtgcagcatacgtagcgccaggtcagtaattgggctaccaatcttccggcctgtatgttcaccgttagcaatgcgaatggcactacattttagatcctgcaaagagtgcaaaacgatttcacagtgggagccaataagcatcgctaacccgtccaccaccgcttcgtaggatttcagaatatcaaaatcggtctggtcgaaaggacgttgatccagtaaatccaactcactggtttcgttggttaaaaggctcctggacatgaaaaaaaacactccttttcaggagcctgtcgttaacttttcagggcaggctcattaatgatgcgggtaactaaattaatacagcggaggttccgctttccagcactaattatatccggcctgtaataaaaaaaccgccgcctggtcaggcggcggttcttaatgcttattttttagcagaatctgcggctttcgcatcagcttccggctttgcatcagccttcggcgctggtttcacatccagcagctctacgtcaaacaccagggtagaattcggtgggatccccggaacacccgctttgccgtaagccagttctggtggaataaccagtttgatcttaccgcctttcttgatgttcttcagaccttctgtccaacccgggataacaccgtccagacggaaagaaagcggttcaccacgggtgtaagagttgtcgaactctttaccgtcgatcagcgtacctttgtagttcactacaacagtatcgctgtctttcggtgcttcgcctttaccggcttctactacctgataaaccagaccagtactagaggttttcacacctttctctttggcaaatttctcgcggtactctttaccttttgcttcgttatcagccgcgtctttttccatcttcgcctgagcagaagacttcacgcgagcttcgaatgcttgtagagtctgttcgatctcttggtcggagagtttgcttttatcagcaaatgcatcctgaacaccagcgatcagctgatctttatccagtttgatgcccagtttttcttgttcttttagagagttttccatgtaacgacccaggctggcacccagtgcataagcacttttctgatcgtcatttttgaacgctgctttgctgtcagcagctgtagcaggttttgcagcttcagcagcaaaagtgattggtgcatgcagggcaacggccattgtggtcgccagcagcgttactttaaacagacttttcatccatatctccaggatcggggcatctcaccccagggttaactattatcagaagggtactataaagcgttgtcgaacaaatctacatacagacacgccctattatcatctattttcagactctttttgtttaaattagtttcgatgaccgcgaaatgagtgctgtctcgggcagcaaagttaagtagaatccgcggcgaccattcgacaaaagaggtgaatcatgcaggatttaagtttggaagcacgcctggcagagctggagagccgactggcttttcaggaaatcaccattgaagaactgaacgtcacggtgaccgctcatgaaatggagatggcgaaactgcgcgatcatctgcgtctgctgaccgagaagttaaaagccagccagccgagcaacatcgcgagccaggctgaagaaacgccaccgccacattattgaggcgtaaaaaaagcggggattccccgcttttttgtcactttttcggtattagtggcaaccgcaaccgccgttgcctttaccgccacagcagccttcgccaccgtgttcatgaccgtgatcgtggccatgaccgccgcagcaaccgtcgtggtcgtgatcgtggtggtgatcgtgcgcgccgtgaacgtgaccatgagccagttcttcttcagtcgcttcgcgaatcgccacaacttcaacgttgaatttcaggttctgaccggccagcatgtggttaccatcaaccacgacgtgatcgtcttcaaccgcagtgatttcaaccggtaccggaccctggtcggtttcagccaggaaacgcatacctacctgcagttcatcaacgcccataaatacgtctttaggaacacgttgcaccaggttttcgtcgtactgaccgtaagcgtcgttcgcgccaacagcgacatcaaatttgtcgccaacttcatgaccttccagcgccgtttccaggccagagatcagggaaccgtgaccatgcaggtagtccagcggcgcactcaccggagactcatcaaccaacacaccgtcttctgtacgtacctgataggccaggctgaccaccaggtcttttgctactttcatgatatctcctgagcatgggaagaatagtggcgcagattgtagcggaattctgcagccgtgtactcactagcttaaaaaaactcggcgcatatcgttagtccggatgaaaaatcccgatcacttgctcatctttgcgaacgtgatcgcgggcttctttgtctgcttctcgcatctgatgtccgcacttaacacattcaacaatatcaatattattttcgcgccacatcgccatactatcctgcgcctgacaggccgggcattttgcgcccgcaataaaacgttttcggattgccatctttaccctttactcaaattcatcccagccgtccagctggcgtcgttcttgttgcatttcacgctggaaaatctcttccagttcgcgtcgggcttccctggcgcgagaaatttgtacggtatcggcatgcattgggatgagctctcgcagcatccgcatatccaggcggcgaaaatgcagttgcgctcgctgtgcctgatgcggatgcatgccaagcgtgaccagcgtcttgcgccccagctctaacgcactggagaatgtttcacgggaaaactgcgtcacccctgcctgtaataactcatgcgcttccacacgtccgcgcgctcgcgcaagaatatgcaaatgcggaaagtgctgttggcatatttccaccagcttcatggtgtcttccggctcgttacaggtaatgacgatagactcagcggcctctgcacccgcagaacgtaaaagatcgacctgcgtggcgtcgccgtaataaactttgtagccgtatttacgcatcaggttaacggcgctgatatcccgctccagcacggtaatgcgcattttatttgccatcagcaaacgaccaatcacctgaccaaaacgcccgaagcccacgacaatgacctggggtttatcatcgttgacccacggtttttcgtcttcttcttccggtccgttaaactggcgggatagccatttatccaccagcttcatcagcaacggcgtggtcatcatggaaagcgtcaccgtcaccagcaacaacgccatctggtcgccctggaataagcgttgactagaagcggtagaaaagaggacaaaggcaaactcaccactctgactcaacacgccagcaaactgcatccgctcactgctacgcacgccatacaatcgcgccagcagatacagcacgagaattttcaccgccaccagcacaaccacgcttatcactacccacaacagatgggtataaagcaccccgaggttgagactcatgccgacagagataaagaacaaaccgagcagcaagcctttgaagggatcgatagccgtttccagttcatggcgatattcactttccgccagcagcacgcccgcaataaatgtaccgagcgccatgctcagccccagcgcatccataaacaatgcggaacccaacaccagcagcagcgtcgcggcggtgaacacttcccgcacgccagaagctgcaataaagcggaataccggacgcagtaaatagcgcccaccaatcagcatgccgacaaacgccagcaccttcatgccgaccttcatccagtcgaaatgttcgtctgcgctccccgccaacaacggcactaacgccagtgctgggattactgccagatcctgaaacagcagaacgctaaacccgagctggccggattcgctgcgattcatccctttctcacgcatcaattgcaacgccattgcagtactagacatcgcaaggccaatgccaccgaccaccgccgcctgccaggcgaaatccgtcagcatcaataatcccgccagcaacgccgcgcttaacagcacctgtgccgcgcctacgccaaaaatgctacgccgcagttgccaaagtttggagggattcaactcaaggccgatgataaacatcaggaataccacgccgagttcgctaaagtggaggatctcatcgacgtcgctaataaaccccagcccccacgggccaattgcaatccctgccagcaaatatcccaacacagcgccaatacccagccggcttgccagcggcaccgcagccaccgccgcgaagagaaacagcactcctgcgagtaaaaaatcggaaccttccatcagcggcctcctggagacagcggatttgccagccagtcaccgtaggctctggcgtggctcgccagctcctgtgcgctttgccgtctcgcccagtaaataatgatgggacttaaccaatgcatccggcacatgcccgccgccagttcaaaggggcgcagcacatcgctcatcgggtagcgattcagcgcgtcataacggtaagcactttccggctcgccggtggtaatcacgctacgccagtactttcccgccagttggtttcctcccggcccgctggcaaaaccacgacttaatacccggtccagccactctttcagtagcgccgggcagctataggtataaagaggatgctgaaagacaatcacctcgtgctcgcgcagtaatgcctgctcacgggggatatcaataaaaaaatcgggatagtgcgcgtaaaggtcgtgcacggtaacattgctgagctgcgtggccggtttaagcagtacccggtttgccacgctgtcctgagattccggatgggcatacagcagcaaaactttcgctggctgagacatcatccccctcccggtatggtttttgtgtatagtcgctgttttgggctaccattgcgcccggtgcggcagctcgcccatacattacattatcataatgataagttaacatagtctgaacatacggcaccttatgattgttttctccagcttacaaattcgtcgcggcgtgcgcgtcctgctggataatgccaccgccaccatcaaccctgggcagaaagtcggcctggtgggtaaaaacggctgtggtaaatctaccctgctggcattgctgaaaaatgaaatcagcgccgacggcggcagctacacctttccgggaagctggcaactggcgtgggtgaatcaggaaacgccggcgttaccgcaagcggcgctggaatatgtcattgacggcgaccgtgaatatcgtcaactagaagcgcagctacacgacgccaacgaacgtaacgacgggcacgccattgcgaccattcatggcaagctggatgctattgacgcatggagtattcgctcccgtgctgccagcctgctgcacggcctcggtttcagcaatgaacaactggagcgcccggtaagtgatttttccgggggctggcgtatgcgtcttaaccttgcccaggcgctgatttgccgtagtgacttgctgctgctcgacgaaccgactaaccacctcgatctcgatgccgttatctggctggaaaaatggctgaagagctatcagggcacgctgatcctgatctctcacgaccgcgacttcctcgatccgatcgtcgataaaattattcatatcgaacaacaaagcatgttcgagtacaccggcaactacagtagctttgaagtacagcgcgccacccgtctggcgcagcaacaagcgatgtacgaaagccagcaggaacgcgtagcgcatctgcaaagttatatcgaccgtttccgtgccaaagccaccaaagcgaagcaggcccagagccgcattaagatgctcgagcgtatggagctaattgcccccgcgcacgtcgacaacccgttccgctttagcttccgcgcgccggaaagcctgccaaatccgttactgaagatggaaaaagtcagcgcgggctatggcgatcgcattattctcgacagcattaaactgaacctggtgcccggcagccgtattggtctgttaggccgcaatggcgcgggtaaaagcacattaatcaaactgttagccggtgaacttgcgccagtcagcggtgaaattggtctggcgaaagggatcaaactcggctacttcgcccagcatcaacttgaatacctgcgcgccgacgaaagtcctattcaacatctggcacgtttagcgccgcaggagctggaacaaaaactgcgtgactacctcggcggctttggtttccagggcgataaagtaaccgaagaaacgcgccgcttctccggtggggaaaaagcccgcctggtgctggcattaattgtctggcagcggccgaatctgctgctgctcgacgaaccgactaaccaccttgacctcgacatgcgtcaggcactcaccgaagcattaatcgagtttgaaggcgcgctggttgtcgttagccacgaccgtcatttgctgcgttccaccactgacgatctctacctggttcacgatcgtaaagtcgaaccgttcgacggcgatctggaagattatcaacagtggttgagcgacgtacaaaagcaggaaaaccagaccgacgaagcgccaaaagagaatgcgaacagcgcccaggcacgtaaagatcagaagcgtcgggaagctgagctgcgtgcgcaaacccagccactgcgtaaagagattgcccgtctggaaaaagagatggagaagctgaacgcgcaactggcgcaggcggaagagaaactcggcgacagcgaactgtatgaccagagccgtaaagcggagttgaccgcctgcctgcaacagcaagccagcgccaaatccggcctggaagagtgcgaaatggcatggctggaagcccaggagcagcttgagcagatgctgctggaaggccaaagcaactgatggcgcagataacgacgaccgatgccaatgaattcagcagcagtgctgaattcatccccatgcgcggctttagcaattgtcatctgcaaaccatgctgccgcgtctgtttcgtcgtcaggtgaaattcaccccgtactggcagcggctggagttgcccgacggcgattttgtcgatcttgcgtggagtgaaaaccctgcacaggcgcaacataaacctcgtctggtggtgtttcacgggctggaaggcagtctcaacagcccttacgcccacggtctggttgaggcggcgcaaaagcgcggctggctgggcgtggtgatgcattttcgcggatgcagcggtgaaccaaaccgtatgcaccgcatttaccatagcggcgaaaccgaagacgccagttggtttttacgctggctgcaacgcgaatttggtcatgcgccaacggctgccgtcggctatagcctcggcggtaatatgctggcctgtttgctggcaaaggaaggcaatgatctcccggttgatgcggcggtgattgtctctgcgccgtttatgctggaagcctgtagctatcatatggaaaagggcttttcccgcgtttatcagcgttacttgctgaacctgttaaaagccaatgccgcgcgcaagctggcagcctaccccggaacgctgccgattaatctcgcgcagttaaaaagcgtacgtcgcatccgtgaatttgacgatctcatcaccgccagaattcacggctacgccgacgctatcgactattatcgtcagtgtagcgccatgccgatgctgaaccggatcgccaaaccgacgctgattattcacgccaaagacgatccgtttatggatcatcaggtgatcccgaaaccggaaagtctccccccgcaggtggagtatcaactgactgaacatggcggtcatgttggctttattggcggtacattacttcatccgcaaatgtggctggagagtcgcattcctgactggttaacaacgtatctggaggcgaaaagttgttgatattaacgtatctggaggcgaaatcatgttgattccgtggcaagacctctcccccgaaacgctggaaaatttaattgaaagctttgtgttacgtgaaggcaccgattatggtgaacatgagcgtacacttgaacagaaagtcgccgacgtcaaacgccagctacagtgcggagaagcggtgctggtatggagcgagctgcacgaaacggtcaatattatgccgcgcagtcagtttcgcgaataacctgcaaccgtcggcggacgagataataatgatagctaagtcatggagttactatgtctgccaaacatccggtcattgcggtaacaggatccagcggcgcggggaccaccaccaccagcctcgcgtttcgtaaaatattcgcgcagttaaatctgcatgcagctgaggtggaaggcgacagttttcaccgttacacccgcccggaaatggacatggcgatccgcaaagcgcgcgacgccgggcggcatatcagctacttcggccccgaggctaacgacttcggcctgctggaacaaaccttcattgaatacggtcagagcggcaaagggaaatctcgcaaatatctgcatacctacgacgaagccgtaccgtggaatcaggtaccggggacattcaccccctggcaacctttaccggaacccactgatgtactgttttatgaaggtttacacggcggcgtagtcacgccacagcataacgttgcgcagcatgtggacttactggtcggcgtggtgcctatcgttaaccttgagtggattcaaaaactgatccgcgacaccagcgagcgcgggcacagtcgagaagcagtgatggacagtgtagtgcgtagtatggaagactatatcaactacatcacaccgcagttttcccgcacccatcttaacttccagcgcgttcccaccgtcgacactagtaacccgttcgcggcaaaaggtatcccgagcctcgatgaaagctttgtggtgatccattttcgtaatctggaagggatcgatttcccctggctgctggcgatgttgcaaggcagtttcatttcccacatcaatacgttagtggtaccgggcggcaaaatgggtctggcaatggaattaattatgctgccgctggtgcaacgattgatggaaggaaagaaaatcgagtaactctgctattacgccggataaaatactatccggcttcacaacgggatagttaagtcacgcggcaaccacttcatagctgtgagtaatattcaccgctttttccagcatcaacgccacactacaatatttctcggcagagagatcaaccgcacgcgcaaccgctgcgtctttcaggtcgcgaccggtgacgataaaatgcagattaatgtgcgtaaacaggcgtggtgcctcttcgcggcgttcagaggtcaattttacttcacaatcgaccacatcctgacgccctttttgcaggatgctaaccacatcgatggcactgcaaccacccgccgccatcaacaccatttccatcggacttggtgctttatcgccactgttgccgtccattaaaatctgatgaccagaggcggattcgcccagaaaagttaacccttcgacccacttcactcgcgcttgcatttttgctactccactgcgtcaattttcctgacagagtacgcgtactaaccaaatcgcgcaacggaaggcgacctgggtcatgctgaagcgagacaccaggagacacaaagcgaaagctatgctaaaacagtcaggatgctacagtaatacattgatgtactgcatgtatgcaaaggacgtcacattaccgtgcagtacagttgatagccccttcccaggtagcgggaagcatatttcggcaatccagagacagcggcgttatctggctctggagaaagcttataacagaggataaccgcgcatggtgcttggcaaaccgcaaacagacccgactctcgaatggttcttgtctcattgccacattcataagtacccatccaagagcacgcttattcaccagggtgaaaaagcggaaacgctgtactacatcgttaaaggctctgtggcagtgctgatcaaagacgaagagggtaaagaaatgatcctctcctatctgaatcagggtgattttattggcgaactgggcctgtttgaagagggccaggaacgtagcgcatgggtacgtgcgaaaaccgcctgtgaagtggctgaaattagctacaaaaaatttcgccaattgattcaggtaaacccggacattctgatgcgtttgtctgcacagatggcgcgtcgtctgcaagtcactagtgagaaagtgggcaacctggcgttcctcgacgtgacgggccgcattgcacagactctgctgaatctggcaaaacaaccagacgctatgactcacccggacggtatgcaaatcaaaattacccgtcaggaaattggtcagattgtcggctgttctcgtgaaaccgtgggacgcattctgaagatgctggaagatcagaacctgatctccgcacacggtaaaaccatcgtcgtttacggcactcgttaatcccgtcggagtggcgcgttacctggtagcgcgccattttgtttcccccgatgtggcgcagactgatttatcaccccgatatcaactatgcacttcgacaaacgctggtgctatgtttgcccgtggccgttgggttaatgcttggcgaattacgattcggtctgctcttctccctcgttcctgcctgttgcaatattgcgggccttgatacgcctcataaacgttttttcaaacgcttaatcattggtgcgagcctgtttgccacctgtagcttgctgacacagctactactggcaaaagatgttcccctgccctttttgctgaccggattaacgctggtacttggcgtcactgctgagctggggccattgcacgcaaaattgcttcctgcaagcctgctcgccgccatttttaccctcagtttggcgggatacatgccggtctgggaaccgttgctcatctatgcgttgggcactctctggtacggattgtttaactggttttggttctggatctggcgcgaacaaccgctgcgcgagagtctaagtctgctgtaccgtgaactggcagattattgtgaagccaaatacagcctgcttacccagcacaccgaccctgaaaaagcgctgccgccgctgctggtgcgccagcaaaaagcggtcgatctaattacccagtgctatcagcaaatgcatatgctttccgcgcaaaataatactgactacaagcggatgctgcgtattttccaggaggcgctggatttacaggaacatattagcgtcagtttgcatcagccggaagaggtgcaaaagctggtcgagcgtagccatgcggaagaagttatccgctggaatgcgcaaaccgtcgccgctcgcctgcgcgtgctggctgatgacattctttaccatcgcctgccaacgcgttttacgatggaaaagcaaattggcgcactggaaaaaatcgcccgccagcatccggataatccggttgggcaattctgctactggcatttcagccgcatcgcccgcgtgctgcgcacccaaaaaccgctctatgcccgtgacttactggccgataaacagcggcgaatgccattacttccggcgctgaaaagttatctgagtctaaagtctccggcgctacgcaatgccggacgactcagtgtgatgttaagcgttgccagcctgatgggcaccgcgctgcatctgccgaagagctactggatcctgatgacggtattgctggtgacacaaaatggctatggcgcaacccgtctgaggattgtgaatcgctccgtgggaaccgtggtcgggttaatcattgcgggcgtggcgctgcactttaaaattcccgaaggttacaccctgacgttgatgctgattaccaccctcgccagctacctgatattgcgcaaaaactacggctgggcgacggtcggttttactattaccgcagtgtataccctgcaactattgtggttgaacggcgagcaatacatccttccgcgtcttatcgataccattattggttgtttaattgctttcggcggtactgtctggctgtggccgcagtggcagagcgggttattgcgtaaaaacgcccatgatgctttagaagcctatcaggaagcgattcgcttgattcttagcgaggatccgcaacctacgccactggcctggcagcgaatgcgggtaaatcaggcacataacactctgtataacagtttgaatcaggcgatgcaggaaccggcgtttaacagccattatctggcagatatgaaactgtgggtaacgcacagccagtttattgttgagcatattaatgccatgaccacgctggcgcgggaacaccgggcattgccacctgaactggcacaagagtatttacagtcttgtgaaatcgccattcagcgttgtcagcagcgactggagtatgacgaaccgggtagttctggcgatgccaatatcatggatgcgccggagatgcagccgcacgaaggcgcggcaggtacgctggagcagcatttacagcgggttattggtcatctgaacaccatgcacaccattagcagcatggcatggcgtcagcgaccgcatcacgggatttggctgagtcgcaagttgcgggatagcaaggcgtaatgcaggctaaaccatcggataaggcattcacgccgcatccgacatcttttgcctgatgcttcgtatttacgccccaaccaccttcgccaccgcgtgggcgaaacgttgcatcccttcatcgatatccgcatcttccaccaccaggctcggtgcaaaacgcatcacatccggtccggcattcagcaccattacgccagcctctgcgcccgcatacaggaaatcacgcgcccgacctttgtactgtggtttcagctctgcgccaatcaacagccccataccgcgaatatcgctaaatacatcgtactgctgatcgatcttctgcagatggtcaacaaaacgctggcgtttcgcctgaatgccttccagcacttcaggggtattgatgatatcaaacgccgcccccgctactgcacaggccagaggattaccgccgtaggtggaaccgtgagaaccaggatgaaacgcagaagcaatttccgccgtggtcagcatggcgctaatcgggaagccgccgcctaacgctttcgcagaggtcagaatatccggcgtaacgccgtagtgcatgtaagcaaacaaatcgccggtccgccccatcccgcactgcacttcatcaaacaccaataatgcctgatgttgatcgcacagctcgcgcaagccctgcaaaaactctggcgtcgctgccgtcacaccgccctcgccctggatcggctcaaccaccaccgcacaggtgtgatcatccatcaccgctttcactgcatggagatcgttaaagggaacgtggatgatgtctgccggtttcggcccaaagccgtcggaatattttggctgcccacccacgctaacggtaaacaggctgcgaccatgaaaagcgttatggaaggcaataattttggttttgaacgggctatgacgcacacaggcgtaatggcgtgccagtttaaaggcggtttcgttagcttccgtgccggagttcataaacaccacgcgttcggcaaacgttgcctcaatcagtttacgcccaagacgcagcgccggttcattggtgaaaacgttactgatatgccacagagtttcgccctgggtttttaacgcgttcaccagcgcaggatggcaatggcccaacgccgtaactgcaatgccacccgcgaaatcgacatactccttgccttgctgatcccagattcggctgccctgaccttttaccggaataaactctgccggagcataaatcggcaggatcacttcatcgaaagtcgcgcgtgtaattgctgtttgttcaattgccatctcatgatcaccctgttacgcataaacaaatgtgaaattataaccacaaaatatgcataaaaaatcactaaatggcaatcagaaatcagcgatgcaggaaattagccagcagttgatgtccttgttcgctaagaatactttctggatggaactgcacaccttccagatcccactggcgatggcgaatccccataatctctcgggtttcgctccaggccgtcacgtcaaagcacgctggtaaactgtcaggttccaccaccaggctatggtagcgtgtcacggtaagtggatttgccagcccccgaaatacgccctcaccgttatgtgtaatcgggctggttttgccgtgcatgacctttgcggcgcgcacaactttaccgccaaatgcctgcgccattgcctgatgaccgaggcagacgccaagaatcggcaagcgcccggcatagtggcgaataacgtcaagggagatcccggcttcatctggcgtacaggggccaggactgatgacaattttttgtggtttaagggcgtcgatatccgccagcgtcaacgcatcgttgcgcttaaccagcacatccgcccccagttcacaaaagtactggtagaggttccaggtaaaagaatcgtagttatctataagcaggatcatggcggctccggtacaaaagaaccgcgctattttactcagattccccggcttcgcttaccactttgctaaatatcatctgcagtgcggtgagatcccccattgccccactctgatttgcctgattccaggcctctttttcgataccctgccagctcagttgatatccggcatgaatcgccagttgctcgaagaagatccgctgtgccagaccacttcccacccggaagggatgcagcacgttgatttcacaatagtaatgcgccagccgctcgacgaacttcgctttctccaggccaaccagataaccttcttcctccagatcctgcatcagggcattgccctctttttcgatataagcaaagtggcagaacggcgtatcaccctgataaatatcaacttcacgcagttgccctgcccagtcgaaaatatcctgatacagctggcgatggatagttcgcaaatgcggtaaaccgcgcaccagcggaccaagctcaatggtcgcagcacgcagcgccgtcatttcgtaagcggcctgttccagccgctgctgctggcggatgttcagccggttacgcatgatatcaaggcctggataaagatacggatcgcgcccttcgccgaatttatcgctcatagtgactcctcagctcttcaaggcgcgctaaagcctctgcggcagtaagagtgactaaaggcatctcgacgccttcaagacggcgactggcctgaaaattacgattacgctgaagctcccagagacgggacttttgcttatcggtgagtttcttcacttgatgcctccctgaacgtgtccatttgccacaagtataagcggcaaatccgggttacgccgggagagcagaagcgcgggcaagattgcccgcgcgagaaatcattacggcaggactttagcggaaaggataactaccggtttactcggcacattctggtacggaccaacgtcatgagtcggcacctgggaaatcttatcggcaacgtccatgcctttcaccactttaccaaataccgcgtaaccgaaatcacgctgaccatggtcaaggaaggcgttatcggcaacgttgataaagaactggctggtggcgctgtctttgtcagcggtacgtgccatcgcgatggtgccacgcgtgttgcgcaggccgttatcggcttcatttttgattggcgggtttggttttttctgctgcatctgctcggtgaaaccgccgccctgaatcataaagccaggaatgacgcggtgaaaggtagtgttgttataaaaaccgctgttcacataatcgacaaagttttgcacagacactggcgctttttgtttatccagctccagttcgatgttaccagcactggttgtcaacaatacgtgcgggtcccctttcgctgccattgctgcgggagaaagagcagaaagagcgaaaacagcagccatcgccgccagggtgcttttgaacatgagatttccttaacaaacagagcagaaaaaaagcaagtgaagagattctaaatagccttcaagaacaaggccatccctttacctaattttacgtatctgaaatatatgtaacctgacgatcactttttattccgtgatcaaaatcacctcttaaaatgcaatttagcaaccgattgcaataaaacatttaaacagatcacaaaatcacctaaaatcgcccgctcgcggcatatcccgctatgccattttatttttgaacgcaggccaatcatgactaacagcaatcgcatcaagctcacatggattagctttctctcctacgcactgactggtgcgttggttattgtcaccgggatggtgatgggaaatatcgccgattatttcaatctgcctgtttccagtatgagtaataccttcaccttcctcaacgccggcattttaatctctatcttcctcaacgcctggctgatggaaatcgtcccgttgaaaacgcagttacgttttggctttctcctgatggtgctggcggttgccggtttgatgttcagccacagcctggcgctgttcagcgcggcgatgttcattctcggggtggtcagcggcatcaccatgagcattggtacattcctggtaacacaaatgtatgaagggcgtcagcgcggttcccgcctgttatttaccgactccttcttcagtatggctgggatgattttcccaatgatcgccgcgtttctactggcgcgcagcattgagtggtactgggtttatgcctgcatcgggctggtgtatgtcgctatttttattctgaccttcggctgtgagttcccggcgctgggcaaacatgcgccaaaaacggatgctccggtagagaaagaaaagtgggggatcggcgtactgtttctctctgttgcggcgttgtgctacatcctcggtcagttaggttttatctcctgggtgcctgagtatgccaaaggcctgggcatgagcctgaacgacgcgggcacgctggtgagtaacttctggatgagttacatggtcggcatgtgggcgttcagctttattcttcgcttctttgatttgcaacgcattctgaccgtactggctggtctggctgcgattctgatgtacgtctttaacaccggaacaccagcacatatggcgtggagtattctcgctctgggcttcttctccagcgcgatctataccaccatcatcaccctgggtagtcagcagaccaaagtaccgagcccaaaactggttaactttgtcctgacctgcggaaccatcggtactatgttgacctttgtggttaccggcccgatcgttgaacatagcggtccgcaggcggcactgcttacagcaaacggtctgtacgctgtcgtctttgtgatgtgcttcctgttaggtttcgtcagccgtcaccgtcagcataacaccctgacctctcattaattgctcatgccggacggcactatcgtcgtccggccttttcctctcttcccccgctacgtgcatctatttctataaacccgctcattttgtctattttttgcacaaacatgaaatatcagacaattccgtgacttaagaaaatttatacaaatcagcaatatacccattaaggagtatataaaggtgaatttgatttacatcaataagcggggttgctgaatcgttaaggtaggcggtaatagaaaagaaatcgaggcaaaaatgagcaaagtcagactcgcaattatcggtaacggtatggtcggccatcgctttatcgaagatcttcttgataaatctgatgcggccaactttgatattaccgttttctgtgaagaaccgcgcatcgcttatgaccgcgtacacctcagctcttacttctctcaccacaccgccgaagagctgagcctggtgcgcgaaggcttctacgagaaacacggcatcaaagttctggtcggcgaacgcgctatcaccatcaaccgtcaggagaaggtgattcactccagcgccggacgtaccgttttttatgacaagctgatcatggcaaccggttcctacccgtggatcccgccaatcaaaggttctgatactcaggactgctttgtctatcgcactattgaagacctcaacgccattgaatcctgcgcccgtcgcagcaaacgcggtgccgttgttggtggcggcctgttaggtctggaagccgcaggcgcgctgaaaaacttaggtattgaaacccacgttatcgaatttgcccctatgctgatggcagaacagcttgatcagatgggcggcgagcagctgcgtcgcaaaatcgaaagtatgggcgtgcgcgttcacaccagcaaaaacacccttgagattgtgcaggaaggtgttgaagcgcgtaaaaccatgcgttttgccgacggcagcgaactggaagtcgactttatcgtcttctctaccggtatccgtccgcgcgataagctggcaacccagtgtggtctggacgttgctccgcgtgggggtattgtcattaatgattcctgccagacttccgatccggatatctacgccatcggtgaatgcgcaagctggaacaaccgtgtatttggtctggtagcacctggctacaaaatggcgcaggtcgccgttgaccatattctcggtagcgaaaacgcctttgaaggtgctgaccttagcgccaagctgaaactgctgggcgtagacgtaggcggtattggtgatgcgcacggtcgcacgcctggcgcacgtagctacgtttacctcgacgaaagtaaagagatctacaaacgcctgattgtcagcgaagacaacaaaaccctgctcggtgcggtactggtgggcgataccagcgactacggtaacctgctgcaactggtgctgaacgctatcgaactgccggaaaacccggattccctgatcctgccagcacacagcggtagcggcaagccgtctatcggtgttgataaactgccggacagcgcgcaaatctgctcctgcttcgacgtcaccaaaggtgatctgattgctgccatcaacaaaggctgccacacagttgcggcgctgaaagctgaaaccaaagcgggtactggctgcggtggctgtatcccgctggtcactcaggtactgaacgcggaactggcgaaacagggcatcgaagttaacaacaacctgtgcgaacactttgcttatagccgtcaggaactgttccatttgatccgcgttgaaggcattaaaaccttcgaagaactgctggcgaaacacggcaaaggctacggttgtgaagtttgtaaaccaaccgtcggtagcctgctggcctcctgctggaacgaatacattctgaagccggaacatactccgctgcaggattctaacgacaacttcctcgctaacatccagaaagacggcacctacagcgtgatcccgcgttctccgggcggtgaaatcaccccggaagggctgatggcggtaggtcgtatcgcgcgtgaatttaatctctacaccaagatcactggctcccagcgtctggcgatgtttggcgcacagaaagacgatctgccggagatctggcgtcagctgattgaagccggcttcgaaaccggtcatgcctatgcgaaagcactgcgtatggcgaaaacctgcgtgggtagcacctggtgccgctacggcgttggcgacagcgtcggcctcggcgtggaactggaaaaccgctacaaaggcatccgtacgccgcacaaaatgaagttcggtgtctccggctgtacccgtgaatgtagtgaagctcagggtaaagacgtgggtattatcgccactgaaaaaggctggaacctgtatgtttgcggtaacggcggcatgaaaccgcgtcatgcggatctgctggcggcggatatcgatcgcgaaacgctgatcaaatatctcgaccgcttcatgatgttctacatccgtactgccgacaaactgacgcgtaccgcaccgtggttagaaaacctcgaaggcggcatcgattacctgaaagcagtgatcattgacgacaaactggggctgaacgcacatctggaagaagagatggcgcgcctgcgtgaagcggtactgtgtgagtggactgaaacggtcaatacgccgtctgcgcagactcgcttcaaacacttcatcaacagcgacaagcgtgacccgaacgtgcagatggtgccagagcgcgaacagcaccgtccggcaacgccgtatgaacgtatcccagtaactctggtggaggacaacgcatgagccagtggaaagacatctgcaaaatcgatgacatcctgcctgaaaccggcgtctgcgcgctgttaggtgacgagcaggtcgcgattttccgcccgtatcacagcgatcaggtgtttgcgatcagcaacatcgacccgttcttcgagtccagcgtgctgagtcgcggactgattgcggaacaccagggcgagctgtgggtcgccagcccgctgaaaaaacagcgttttcgcttaagcgacggcttgtgcatggaagacgaacagttttccgtcaaacattacgaagcgcgagtgaaagacggcgtggtgcagctgcgcggttaatgttttaacgggaggcgcaatgcctcccctttttgcatggtcctgtaataatcttcggtatattgcaggacattttttaaactttttgttttattttttgtttttattttttaaaggataatcaaatgtttacagacactattaataagtgtgcggctaacgctgcgcgcattgcacgcctgagcgcaaataacccgctcggcttttgggtcagctccgccatggcgggcgcgtatgtgggtcttgggatcatcctgattttcacgctcggtaatttgctcgatccatccgtacgccctttggtgatgggcgcgacctttggtatcgccttaacgctggtgattatcgccggttctgaactgttcaccggacacaccatgttcctcacctttggggtaaaagcgggcagcatcagccacgggcaaatgtgggcaatcctgccgcaaacctggctgggtaacctggtcggttccgtcttcgttgccatgctctatagctggggcggcggtagcctgctgccggtagataccagcatcgttcactccgtcgcgctggctaaaaccactgcaccggcaatggtactcttcttcaaaggtgcattgtgtaactggctggtttgcctggcaatctggatggcgctgcgcactgaaggggcggcgaaatttatcgctatctggtggtgtctgctggcatttatcgcgtccggctacgagcactctatcgctaacatgacgctgttcgcgctctcctggttcggcaaccacagcgaagcctacacgctggcgggtattggtcataacctgctgtgggtgacgctgggtaatactttaagtggtgccgtattcatgggattgggttattggtatgctacgccgaaagcgaatcgtccggttgcggacaaatttaatcaaactgaaacggctgccggttaattactaaggggtttttacgtggatcatttgcctatattttgccaattacgcgatcgcgactgtctgattgtcggcggtggtgatgtcgcggaacgcaaagcaaggttgctgttagacgcaggcgctcgcttaacggtgaatgcattagcgtttattccacagttcaccgcatgggcagatgcaggcatgttaaccctcgtcgaagggccatttgatgaaagccttctcgacacctgctggctggcgattgcagcgacggatgatgacgcgcttaaccagcgcgtcagcgaagccgctgaagctcgtcgcatcttctgtaacgtggtcgatgcgccgaaagccgccagctttattatgccgagcattattgaccgcagtccgctcatggtagcggtctcctctggcggcacctctccggttctggcacgcctgttgcgcgaaaaacttgaaagtctgctgccgttacatctgggccaggtagcgaaatacgccgggcaattacgcgggcgagtgaaacaacagttcgccacgatgggtgagcgtcgccgtttctgggagaaattgttcgttaacgaccgcctggcgcagagcctggcaaacaacgatcagaaagccattactgaaacgaccgaacagttaatcaacgaaccgctcgaccatcgcggtgaagtggtgctggttggtgcaggtccgggcgatgccgggctgctgacactgaaaggactgcaacaaattcagcaggcagatgtggtggtctacgaccgtctggtttctgacgatattatgaatctggtacgccgcgatgcggaccgtgttttcgtcggcaaacgcgcgggataccactgcgtaccccaggaagagattaaccagatcctgctgcgggaagcgcaaaaaggcaaacgcgtggtgcggctgaaaggtggcgatccgtttatttttggccgtggtggcgaagagctggaaacactgtgcaacgcgggtattccgttcagcgtggttccgggtattaccgcagcttctggttgctctgcctatagcggtattccactcacgcatcgcgattatgcccagagcgtacgcttaattaccggacacttaaaaaccggtggcgagctggactgggaaaacctggcggcagaaaaacagacgctggtgttctatatggggttgaatcaggccgcgactattcagcaaaagctgattgaacacggaatgccaggcgaaatgccggtggcaattgtcgaaaacggtacggcagtcacgcagcgcgtgattgacggtacgctcacacagctgggagaactggcgcagcaaatgaacagtccaagcctaattattattggtcgggttgttggcctgcgcgataaactgaactggttctccaaccattaatttaacccgggccagagaattctggccttcttaatgactctttttatatattcagcaaataaaacatagccccttaataaatattatctgctaatgggttatattcaccgttacagcgacttacaaaattaagtcattcgctcactgacgccaattaaatattcctgtatcgttcttaacgagcagtctgcttatattcatataatcaatgaatattaattaatatataatacatagggaatgtaaatgaacaaatttattaaagttgcactggtaggtgcagtactggctacgttaactgcatgtactggtcatattgaaaaccgtgataagaactgctcttacgactacctgctgcacccggcaatttctatttctaaaatcattggcggttgcggtcctactgcacagtaagtctctgacagaaatcggctaacaccggtttaattgcccgacgccctctggattttccgagggcgtatttgtttctatgtccttcttgcccccgcccgtaaaaatattttcactttaaattcaatttgataactacatccattagccacagcgcgatcctgtgcgaaattttgtgatcttcctccacattacataacatcatatgttgttatattcatcatgcattgtcatgttaccttttaaatgactgcaaactctcccctacaacgtattggacaagaaaaaggtatcgctatgggaagccaggaactccaacgcaagctcggattttgggccgttcttgcaatcgccgtcgggacaaccgtcggctccggtatttttgtatctgtgggtgaagtggcaaaagcagcgggcacgccgtggcttacggtgctcgcgtttgtcattggcgggttaattgtgatcccgcaaatgtgcgtctatgcggaactatccaccgcttatccggaaaatggcgcagattatgtttatctgaaaaatgccggaagccgaccgctggctttcctctccggctgggccagcttctgggccaacgatgcgccgagtttgagcattatggcgctggcgattgtcagcaatcttggctttttaacgcctatcgatccgttgctcggtaaatttatcgccgccggattaattatcgcctttatgttgctacacctgcgctccgttgaaggcggcgcagcgtttcagacgctaattaccatcgccaaaattatcccgttcactatcgtcattggccttgggatcttctggtttaaagcggagaattttgccgcccctaccaccactgcgattggcgcaacgggcagctttatggcgctgctggcggggatctctgccaccagttggagctataccggcatggcctctatctgttatatgaccggcgaaattaaaaaccccggaaaaaccatgccacgagcgctgattggttcctgtctgctggttctggtgctctacaccctgctggcgctggtgatttccggcctgatgcccttcgacaaactcgccaattctgaaacgccgatttccgacgccctgacctggatccccgcactcggcagcaccgctgggatctttgttgccatcacggcgatgatcgtcattcttggtagcctttccagctgcgtgatgtaccagccgcggctggaatacgcgatggcgaaagacaacctgttctttaaatgcttcggccatgtgcatccgaaatacaacacgccggatgtctccatcatcctgcaaggggcgctggggatcttcttcatcttcgtttccgatctcaccagcctgctgggttatttcaccctggtgatgtgtttcaaaaataccctcaccttcggctccatcatctggtgtcgtaaacgcgacgattacaaaccgctgtggcgtactccggctttcgggctgatgaccaccctcgccattgcgagtagcctcattctggtcgccagtacctttgtctgggcaccgattcccggccttatctgcgccgtcatcgttattgctactggtctgcctgcttacgccttctgggcgaagcgtagccgccagctcaacgctttgagctaatgttatctggagaaaataaaatgttggatattgataaaagcaccgtggactttctggtcaccgaaaatatggttcaggaagtggaaaaagttctcagccatgacgttccgctggtgcacgccatcgtggaagagatggtgaagcgcgacattgatcgtatttatttcgttgcctgcggaagcccactcaacgcggcgcaaacggcgaaacatctggcggatcgcttttccgatcttcaggtctacgccatttccggctgggagttctgcgataacaccccgtatcgcctcgacgatcgttgcgcagtaattggcgtttctgactacggtaaaaccgaagaggtaatcaaagcgctggagctgggccgggcctgcggcgcactcactgcggcgttcaccaaacgcgcggatagcccgattaccagcgcggcggaatttagcattgattatcaggccgactgtatctgggaaattcacctgccgctctgctacagcgtggtgctggagatgatcacccgcctcgcgccgaacgcggaaatcggcaagatcaaaaacgatctcaagcagttgccgaatgcgctcggtcatctggtacgcacctgggaagaaaaaggccgccagcttggtgaactggccagccagtggccgatgatttataccgttgctgcgggtccgctgcgtccgctgggttacaaagaaggcattgtaacgctgatggaatttacctggacgcacggctgcgtgattgagagcggagagttccgccatggcccgctggagattgtcgaaccgggcgttccgttcctgttcctgctcggcaatgatgaaagtcgccacaccaccgaacgcgccattaactttgttaaacagcgtactgacaacgtgatcgtcatcgattacgccgaaattagccaagggctgcacccgtggctggcaccgttcctgatgttcgtgccaatggagtggctctgctactacctgtctatttacaaagatcacaacccggatgaacgccgctattacggtggtctggtggaatattaatccctctcccggcccggcaacgggccggatttacgcaaggagttacccgatgaaaacaggtatgtttacctgcggccaccagcggctgcctattgaacacgcatttcgtgatgcaagcgagctgggttacgacggcatcgaaatttggggcggtcgcccgcacgcgttcgcgccggacttaaaagcgggcggcatcaaacaaatcaaggcgctggcgcagacgtatcagatgccgattatcggctatacgccagaaaccaacggctatccgtataacatgatgctgggcgatgaacatatgcgtcgcgaaagcctcgacatgatcaagctggcgatggatatggcaaaagagatgaacgcgggttatacgctgatttccgcggcccacgcgggctatctcacgccacctaatgttatctggggacggctggcagagaacctaagcgaactgtgtgagtacgcggaaaacatcggcatggatctaatcctcgaaccgttaacgccgtatgaaagcaacgtcgtgtgtaatgctaatgatgtgcttcatgcgctggcgctggtgcctagcccgcgcctgttcagcatggtcgacatttgcgcgccgtatgtccaggcggaaccggtgatgagttatttcgacaaactgggcgataaattacgtcatctgcatattgtcgacagcgacggggccagcgacacgcattacattcctggagaaggcaaaatgccgctgcgggaactgatgcgcgatattattgagcggggctatgagggttactgtacggtggagctggtgacgatgtatatgaacgagcccagactctatgcccgccaggcgctggaacgctttcgcgcgctgctgccggaggatgagagatgaaaaccctggcgacaatcggcgataactgcgtcgatatctacccgcaactgaataaagcgttttctggcggtaatgcggtcaatgtggcggtgtactgcactcgctacggcatacagccgggatgcattacctgggtgggtgacgatgactacggcacaaagctgaagcaggatctcgcccgcatgggcgtcgatatcagccatgtccatacgaaacacggcgttaccgcacaaactcaggtggaactgcacgacaatgatcgcgtttttggcgactacaccgaaggcgtgatggccgactttgccctgagtgaagaggattacgcctggctggcgcagtatgacattgtgcacgcggcaatctggggacatgcggaagacgcattcccacagctgcacgctgcgggcaaacttaccgctttcgacttctccgacaagtgggacagcccgctctggcagacactggtgccgcatctcgattttgcctttgcctccgcaccgcaagaagacgaaacgctgcgtctgaagatgaaagcgattgttgcccgtggcgcaggaacagtgattgtcacgctgggtgaaaacggcagcattgcctgggatggcgcgcagttctggcgtcaggctcctgaaccggtgacggttatcgacaccatgggtgccggagatagcttcattgccggattcctttgcggctggtctgcggggatgacattaccgcaggcgatagcgcagggaacggcgtgcgcggcgaaaaccattcagtaccacggtgcctggtaagtataacgttggcgtgagcatcttcacgccaacgtgctgttacttgccggaaaacgaccctataatccgagtaattcattctttatttcagggtcgattatgagtgctacggaccgctactctcatcaactcctctacgctaccgtccgccagcgactgctggatgatatcgcgcagggggtttaccaggcgggcaacagatccctaccgaaaacgagctttgtacacaatataacgtcagccgcattaccattcgcaaagccatcagcgacttagtggcagacggcgtactgatccgctggcagggaaaaggcacctttgtacaaagccagaaagttgaaaacgccctgcttactgtcagtggttttaccgattttggcgtcagtcaaggcaaggcgacgaaagagaaagtgatcgaacaggaacgggtcagcgccgcgccgttttgcgaaaagctgaacatccccggaaacagcgaagtgttccatctctgccgggtgatgtatctcgataaagagccgctgtttattgatagtagttggatcccgctgagccgttatcctgactttgatgagatttacgtcgaaggaagctccacctatcagttatttcaggagcgttttgacacgcgagtggtcagcgacaaaaagaccatcgatatctttgccgccacccgcccgcaggcaaaatggctgaaatgcgaactgggcgaaccgttgtttcgcatcagcaaaatcgcctttgatcagaatgacaaaccggtgcacgtctccgaactcttctgccgcgccaatcgcatcaccttaactattgataataaaagacattaaccgtaggccggataagatgcgccagcatcgcatccggcgatgctggcgcgttgaattttacatcccgtacgttcccctcaccctaaccctctccccaaaggggcgaggggaccgttcagtacggaatttagcttgacggtgctatccagcattaaatactggcaatactctcacgcaaaatccgcagcaccgtctcttcaccgctgcgattcgggttaatgcgaatcgcacaatgttcactttgtggattcgcctggcgaaacgttccggaaaggcgataaaagagcggcgggatttcatatttgctctctgcacccaccgggtaaggcaaggcaccgcgcttttgcgcctcttccagcactctggcggcaatcggctgatgaaactcgacaatcaacaccttgctctgcgcattagcaatcaccgcgcttttcacttccggcaccgcaccaccgttaagcaaagccagcaaccgttcagatacccctgcctgcaccgcgtgcatcactggcgcaaacaccagaccacgcaatacttccagcgcctgtgcgccctggatctggctaccgccggagtaaagcgtggcgcgaatacggttgataacatcagcatcgccgaccactgcaccaacaccctctggcccaaatagcttgaagcaggaaaatgtgctgacattcgcgccgcattcacagccgattcgagccaccttcatcaccgcatagttgtcatcggttaacgctggaacacctgccgcgcgcaacgttgccagcacatctgccagcacgtagctgtcctgcggctgctggcgcgtatgctgcaccagcgccgcatccggttgttgctcgtcgacgacctgcttcagtgcgctcaggtcattgaaatcaacagtaataagcgtcagccccatctgctcaataataacccgtgtcgtcgggtaaacaggcgcgtcatgcaccagaagacgctgccccggtttgagcaaagccgccagcccggcgcgaatcgcgccagtccccgcgtcctgcaccagcgccgcagcctgtgcgtgaaatgcatcagccagcacctgttccacacgctgggtaacgcgcggttgattcagtcctggcgttaagcctaaatcaccgccagtaagaaactcgctgccggggaaatggcgacaaatgctatccaccagcgcaaactgcttttgctgcgcctcaataatcgtcaggctttgcagaggaaacgtcttcataggtgccttccttaagccggaacgaacaggccaagccagtaaagaacattcagcagaataccggtgatcattactgccacgaccggtgccgccattttctgtaccggacggcccagggattcgttgaggaagtaaatggcaaccgcgatagagaatccggtataacccgccatcttaattgctgcgaaaatgctaccgaccagcagcgccacttccatcagcatattcatggcgttacggatgttatcgctcgcattacgcacgctcgggtagcgtcccagccatttgccgatgctacgaagcagcaagacttccgcgctaataaccactgcgcctaataccgctgcaaccatcggattcgggctgagatagtccaccgcataaacaaaggtaaagcccgcaactgcatacacacccgttgctaacgcggtggtggcaatcaacggcacaaaccccagtccgcgcataaattctgccagagccgcctgattaatcagcgtttggctttgttccggcgttacgcctgcggaatatgctttctccagtgtgaagatgctcacttcactgccagcaaaaatcttcatgctggcaacggcggcaatcaatgctcccacgatggcgatatagggtaagtttttgataatccgactcgtgcgttcttcaaacacgctaagcccgctggcatcaatgtcattttcatcacgatgacgcaggtcgtgagttatcgcgatccccagcagcatcaccatgccaataaagatttcgatggattcagggttaagatgtgggaaatagcgcacgactaccacacgggtcatcagtaccaccacggcggcgatcagactttgcttccagccaaactggtagaaaatcgccaccagcgggaacagtgcaaaagcactaaccaccgggctgcttaattcccccaggctacctaatacatccaccggcagcgcggtcagcagctggtttactggcaacaggcaagtaaggatcaacacgccccagatagcgccaagaccaaacgccatcaggctgtttatcgccaggacgccgaggatatcggtaggaagaaagagtaaccatgcgttgagcagcccggttttcagggtaaaagagatccccacgctggccacaaaaccaatgctcagaccaaaagcgatactccccgcctcgcgacggttcatatagccttcaatcagttgcggcaggatcgggcggatgccgtcatgaaaaacagccgcgctgcgatgcgccagaaggcttgtcatacccgtcaggcacgccaccacgataatctgaatatacagatccatagtcgtgccttttatttcagatggttaatcagcatcggaatcgcgtgttcgacgtgctcaacggaaaggccaaacgccacttttccttcagcgatcattttggcgatatgctcgtctttcgctttaatgcctggtttggcaatggtgcaacttttgttatagcctatcaccgcgatggcaatgctcaatgccgcgcccgcaccggtattacacgcgccgatgtaataatccagttgcccggatttcaccttcattgccgcttccatgtcgttgtgaatgaaaacttcaaaacagccaggagccgtcgcttcaatagtttttttaatctgctcacgctgtaagcctgcaacgccaatctttttcatgagtctgtccttattggaaaaattgagagggattttcacgtaacatcacatccacatcggcctgactgaatccactctggcgcaattgcggaataaaggtggttagtaaatagtcatagccataaccaccgttggcttttaaatgggagcggcgcgtaatatccatgctcagcatgacgcggttcagcaacccacggtcgcgtagcgcatgaagcatcgcaatacgcttttcgtccgggtagtaactgttcttgccgatggtgtcgaactgcacgtacgcgccgagatcgatcatcttcaaaatgttgtcgaggttgtctttcagatcgcagtgaccaacggtgacgcggctaagatcaaccccgtgggcttgtagcaacgccagttgctccagccccatcgtgctgaagctcgtatgcgtggagatcgggcgtccggtctggttatgcgccagcgcagcggcaataaataccttctcttccagcggcgtaatctttccttcgctggtgccgatctccgcgatgatcccggctttcagctccgtgccatcgataccctgttcaatttcatcgaccatctcctgcgccagttcctgcacgctgcgggtcgccacatgttccgggaaaaacgcgtcctggtaataaccggtacaggccaccacgttgatccccgtctcgcgcattacatcaagcataaattgcgcattgcgccccatgtaacggttggtcatctcaatcacattacgcacgccccgggtcatcaggtcgttcatctcctggcaaatgaacgcatactgatcaaggcggcagtccacgttgtttttaaagccggagagatcaatatgcagatgctcatgggcgagggtgtaacccgtcggatcaaaactcatagggtgtctcctgcaaaccggagggaggaaagaaaagagcgaccattttgtggcggtggcgcgcggaaaaattcacacacggtagcccccacatcagaaagcgtggtgcgcacaccgagctgcgtagcgatcatcccttgctgataaaccagcactggcaccacttcgcgggtatggtggctgtgaccaatggtcggatcgttgccgtgatccgccatcacgaccaggcaatcatctggctgcatcgcctcaacaagccgggcaaggttacggtcaacgacctgcaaacgttcggcataacgtgcgacgtcttctgcatgaccagcgaggtcggtttcctgaatgttggtgcaaataaacgccgtcggatgggtgttaaattcgttgagggtgatatccataatccgctggctatccaccagattttgccagctcacgccataaggattgttgacgatatctgccaccttacccaccagcacggttggcacgcctgcttcatacagtttttgtggcacctgcactttttcatcgacgccatagcccatatgcacgacctggaaaccgttgtcataagcgccagaacgcggcgcattgataccaataaagcgcccttctttgctttctgcggcatcgagaatgcgttgactgtcggttaacaggccaccaaatgtaatgacccgaccgacctgtacctgctcacgcacgatacgaccaattttgattgcgtcgtcaaaagagatcacagagagattggcggtaatgttatagacctggcctaaatccgcctcgagattatcgccaatcgcaaccgcctgattgacccacagaaattgcagatcatcgccacggcgctccacctgccagccagcggaaactaatgcctgctcaacacggtcaatcacatcgcgaaaaggcatccgcagcggcggtaacgggcgcgtgcctaaaatttcctgatgccccataaaggtatcgccaccttcatgttgcagctctgccacgccccaggttgcggaatcactcggctgcatatcgcctggcgcataacccaatgcgttgattagccccagcgtctccagcgttggtagctgcaaatgcggcaactggctcaggatgtgaccacatgtattcgctcccgcatcttgcggacgcaccagcgtgacatctttcattgcccctacgccaaagctatcaatcactaacaccacaaatcgcgccattacgcccccagagagtttccaagactgtcataacgaccgacgatttccggttcgccacgatgaataccggacaccagcaccacatcgctacgggtgacaaaaatctgcgtgcgaaaacagagcaccactgcactgcttaccggaaactcgcctgccagcggcagggtgtagtcgatactgctgtcatccacagttttgagattggtttcagtaatcttttgattttctggcgtaaacaccaacgcatgttgcgcatgaccacgacgatagtaaccgccgccgtagcagtagctgtcgccacggaaatgatgggagatttcacttaaccagagcatcgcgatacgttcaggctgatcgccctgctggtttgccggaatagtgcccgtcagcgcatgaccgggttcggcatgagtcacaccgtattgcgccagtaatggcaggctagtgcagctggtcgcactaggcgcgttcagttgctcaagtgcaataccagatttcgccagttgatcccgtgcctgtatcagcgtgtgaagattcggtgtcggcaaaacttttccgacagcctcatcccaaagcaggcaagggaaatgggtaagtccggctaaatgcagccctggcagattctggatttcggcgacaatctccggcaacaccttgagggcaaaaccgctctcctggcccggataaagaaaatcatcgtcgctataaactttaagcagcacagactggattcgcccggccttcaccgccgccgcagaaacttcccgcgctttgtcgagagtaaacacggtgatgacgtcggtgccctgttcaacggcgtcagcaacctgatgacaagggatttgtaccagatgcccctgatgcgccacaggcaaaccagcgcggcgcatgactcgcgcctctttgtaatccaccgccacaatgccgctgtagcctaatgccagcaatttttccgccagccacggattacgaccaaactgcttggtcatcagatacagttcaatgccgtaaagccgcgccgtctcaatcagccgcttaccgttttccagtatctgatccacgtcgatcacccagctgtccggggcgatcttgccctgctgccacaggcttagtgcggcggaaatcagcgccgggttctggcgtttcaatgcttctacaaacatcttgttgcctcgtttctgttccttgaattaaatattcatttttttgaatatttaggttgtgcgacgtggatttgtcgggagcttcaaacctcttcgttagcagccatccataatccataaaggttggccagcaaatagccttcttcacacgggttaacttccagtgcgaattccttcaacaacacctgatgcaattgcacaacggcttgccagtggctggattgcgccagttctgccagcaactcgttatccagcggctctatttcttcaccacggcgactgcgcatcagtgcactcgccatatgtgtcatcgccatcgttccttgctcactgcgcaccggcagatggcactctgtttccagtacgttgacgacctgcatcatgcctttgcagatgtccttatcaataacgcctgcctcgcaaagcaggttgagtctggtttccatatcagatgcctttcgtttaataactcggttcctgttccccactcactacccgttgttgatgggcgagcagggcgtgtttatctacaacggcacgcagcagttgttgcattgggtaatcatcgactcgcgtcaggaccacggcttcggtggcctgtaaaaatcgcggatcgtctgtgagcggcgtcgcctctaatcccagcatggtcagttcgttttccgccaccacgttccagatcaccgcatcgacatcgcctttaacaatgcgttgtaaactctcgtgataagagagatcgactcgttccacatcactaccgccaaaaaaaacatcggtcatgattttctgatccgcgctacggttatccagccccacgcgcttcacgtttgcggactcgcctttacggcaaatcaactggtgctcgccaacgtaggtgtgcggccccaactccagcgcgaggcataagcctttttgcgtgagataactttccgccgctagtcggctaaccaccgccatgtcatacacgccattaagcagacactccacgcgaatatccgcgccacgcatgtgcgcatagtaaaaaggaatgccatcaaactgggctttcaatccgctcgccaggccttcgtacaaacgggtatagggcaagggcattgcacataccacgttgttgatatccacatgagtcagcaatgctttgttatccatctcgaccagataactgccattgcgcccacggcgttcaatccgtatcgctccgctactttccagcgttttcaacgcggcctgcgtcaggccaacggaactacggcattcatttgccagctcatctatggttttcaatcgattaccgcacttttcacccaacaaataacgggccagcgtcgtgatgacgacgccttcttttttgataaacgttcgacgcataataaattttcagtaaattgaatatttatatcttcaggaatttgaagataaggcgcaacagcgagatgtggaaacggcgaggcacttcacattttttcggattattgcaaatgaggataaaaaaaccgggtttccccggtttcagagtgatgataaaagcaaaattgcctgatgcgctacgcttatcaggcctacatttccttgcaatatgtgcattactttgtaggccggataaggcgttcacgccgcatccggcatgaacaaagcgcaatttgccagcaatagtgaattacggcttcgccacaaaaccaatcgcttcgtacaccgcttttagcgtacgggaagcgtgcgcgctggctttttccgcgccatctttcatcacctgttgcaggaaggcttcatcgttgcggaaacggtgatagcgttcctgcaattcagtcagcataccggaaacggcatcagccacttcacctttcagatgaccatacatcttgccttcgaactgtttttccagttctgggatgctctggcccgttaccgcactaaggatatccaacaggttggaaacgcccgctttgttctgcacatcgtagcgaactaccggcggctcgtcggagtcagtgaccgcacgtttgattttcttcactacgcttttcgggtcttccagcaggccgataacgttattgcgattatcgtcagacttggacatcttcttggtcggctccagcaggctcattacgcgcgcgccagatttcggaataaacggctccggcaccttaaagatctcgccatacagcgcgttgaaacgctgggcaatatcgcggctcagttcgaggtgctgtttctggtcttcacccaccggtaccagattagtttgatacagcaggatgtccgctgccatcagcaccggatagtcaaacagaccagcgttgatgttctcggcataacgcgcagatttatctttaaactgcgtcatgcgactcagttcgccgaagtaggtatagcagttcagtgcccagcctaactgtgcatgttccggcacgtgggactgaacaaaaatggtgcttttctcaggatcgataccacaagccagatacaaggccagcgtatccagcgtcgctttacgcagcttctgtgcatcctggcgcacggtgatcgcgtgttggtcaacgatacagtaaatgcaatggtagtcatcctgcatgtttacccactgacgcagcgcacccatgtagttaccaatggtcaattcaccactgggctgtgcgccactaaaaacgatgggcttagtcatttttgctttcctgattttcgctatgcggaagccctaatgcgggcagaaggtcatttatagactgataaattacatcaggctggctgagatcgatagcctcgccgtagttatatccgtaggttaagccaacacttgggcaacctgccgcttttgccgcctgaatatcattgcgactgtcgccgacaaacagcatctgttgtggggcaattcccatccgctcagccaccagtaacagcgggtccggatgcggttttttgttttgcacatcatcaccaccaatcaccacgctgaagtatttggcgatatctaaggcttcgagcagcggcgcgacgaacggcgtcggtttgttggtgaccaggcctagcggcaggcctttagcctgcaacgcgcccaacgtatcggcaacgtgcgggaacaaaaacgtcccctcttcggcaacctcgccatagtagcgatcgaacagtttacgcagaatacgtacctgttcttctgccggaatgtcgtcatcaacgggcggtttacccattgttttacgctgagtcgcacgttcctgacgcgcccaggtcaatgcgcgctccatcagaacatctgcgccgttaccaatccaggtaataacgcgttcttcacctgcgacgggcaactccagcgcatacagcgccatatctaccgcagcagcaagaccaggagcactgtcgaccagcgtaccatcaagatcaaaagcgacgccgcgaatatcttcaaacttattcatgacttacctttgccagttcactgcgcatttcatcaatgacttttttgtagtctggctggtcgaagattgcgctaccggcgacgaacatatccgcgcccgccgcagcgatttcgccaatgttgttcaccttcacgccaccgtccacttctagtcgaatgtcaaagccagactcgtcgatacggcgacgtacttcgcgcagtttatccagtgtttgaggaatgaaagactgaccgccgaaaccagggttgacggacatcagcaggatcacatccagcttatccatcacgtaatccagatagctcagaggtgtcgccgggttaaataccagacccgctttacagccattttctttaatcagttgcagcgtgcggtcaacatgctcggaggcttctggatgaaaggtaatgatgctggcaccagcggcagcgaaatcaggcacaatgcgatcgacgggtttcaccatcaggtgtacgtcgataggggcggtaatgccatagttacgcaaggatttcagcaccattggcccaatcgtcagattgggaacatagtggttatccatgacgtcaaaatgcacgacatcagcgccagctgccagggcttttgcggtatcttcacccaggcgggcaaaatcagcgctcagaatactgggggcaatcaaatactgtttcatccgcttctccttgagaattattttttcgcgggactaacgactcctggtttgtacaaagccagcagttcgtccacctttttacgtgtgccgccgttgctgcttatactgcgtcgaactttgacgacatgcaattttgcgcgctgataccactcacgcgttaacatcgtatcgtgattggagatcagcactggaatatggcgctcaaccagaccttcggcgatctccgccagatgcgcttgttgttcaagcgtaaaactgtttgtgtgatacgccgtaaagttggcggtcgcagacagcggtgcataaggcggatcgcaatagacgacggatgcatcatctgcgcgcgccatgctatcggcgtaagactcacaatagaaaaaggcattctgcgctttttcagcgaagtgatacaactctgcttccgggaaatagggttttttgtagcggccgaacggcacgttaaactcaccgcgcagattgtaacgacacaggccgttgtaaccgtagcggttcaaatataaaaacagtaccgcccgacggaacggatcctggcttttgttgaactcttcgcggaactgatagtaaacctcggcgcaatttgtttcgggaacaaacagctcgcgtgcggcctgtacgtactcatcagtacgcatcttcacaatgttatagagactgatcaggtcgctattgatatcggcaaggatataacgagaaaagtcggtgttgagaaacacgctcccggcacctacaaaaggctcaaccagacattcgcccttgggcaaatgccgtttaatatcatcaagcaggggatacttgccccctgcccacttcaaaaaagcgcgatttttcttcatgctgactaactaattacaccttctccggctgtggagaaagctccgacagcatccagcgcttcaggcaactcccgcaacgataaaccattgcgggagataaccttgattacttcagatcggcctgtacctgacgcagcggtttcgcccacgggtttttggcctggacatctgctggcaatgtagataccgcttttttcgcctcttctttgctagcgtacacgccagaaaccaggacataccacggctgaccattacgcgtcgtttcatagacaacgtagtttttcagattctctttcttcgcccaaccgttcaggttgtcgtagttagaggaactgctcagctgcagagtgtaatggctggacggtgcgcttttcaagctaccaacattacctgcggtcttcgccccagcagcgggtgttgctgtggtttgcgccggggatgccgtctgtactggagccgtagtcgccgtctcttttggtgctggcgtagaagtcgcagccggtgccttcgtgctcgccacaggggcagctggttcagtacgcttcggcgtctgtgctaccggcttcggctccgttttcacggttgcttgcggttttttcggttcaatcaccgcctgctgacgagctgggcgcgtagtggacggacgttcagcggtttgcgttttcgccgtgtcacggcttgcattgccattgcgaacaggcgcaaccgttgcgggttcagtcggcaacgtggaattgaccgccacattgttcagctgttgctgattttgtggctgggtcagcgcattgttcaggtcaccctgcacttcaacacgttgttgaccatccgttgccaccggggtttgcccttgagtcggcgtagaagagatcggtggcagagaaacatcctgctgagtattttccgcagacgtggttcccggcgctggctgcacgccattcgcctgatcggtcgcattgccagcaagatcaatactcttctcgccagacgcggtttgatcgctggaagtggtgctgggggcttttagcgcagaaccgataccgatgatcaacagcagtagaaccagaatgccgacgcccatcatcatatactgacgagaagcgggtttactggctgcttttttgcgcttacgcggacgacgctctacgcgctcttcatccacggtttcatcttcggattcgtcaatttcttcttcgatttccggttcctcattgcgctctttttgcgcacgagtcggacggcgatcgtcagtgtcatcaagttcaatatcatcaaaattgatctgcggttcgccacgttcagtacgctcagaacgttcagaagattgacgagaacgaccagtacgacgatcgctgggatcgggtttcagctcgtcttctggtttgaattcatccatttaacaccccactaaaaggttaatgcttaccacgttgcaattaacctgaagctaatagaccgcttgataagcggcctgacctttcttgttgttacgcactttgacaatcggcaatggcgttaagaacaagctcgtggctaacgccgctgcgaacttcactcttaccaattgccaacggaagaattaagcgcatctctcccgcaaggactttcttgtcacgcagcatatgcggtaaatacgcctgcgcggacatttcgcgcggcccattgaccggtaacccagcccgcttgagcagggttataatacgctgcgtttcggcagaactaaactgcccgagacgttcgctcgtccgcgccgccatcaccatacccgcagcgaccgcttcaccatgtaaccaattgccataccccatttcagcttcaatggcatgaccaaaggtgtgtcccagattcagtaaagcacgtaacccggtttcgcgctcgtcggcggcgacaacttctgccttcagttcacaacaacggcgaatacagtacgccattgccggaccgtccagacgcaacaacgcatccagattctcttccagccagttaaaaaacgcaccgtcaagaataatgccgtatttgatgacttctgccagcccgctcgctaactcacgcgggggaagcgttttcagacagtcgagatccaccaccacactagcaggttggtagaacgcgccaatcatgtttttaccgaggggatggttgaccgcagttttgccgccaacggaggaatcgacctggctcagtaacgtcgtcgggacttgaatgaaacggacaccgcgctgataactcgccgccgcgaagccggtcagatcgcccactacgccgccgccaagcgccaccagcgtagtatcgcgaccatgcggtttttgtaacaacgccgtaaagacggtatcgagtacagccaggcttttatactgctcgccgtcagggaggataacgctatcgacgttaacacccgcctgttcaagtacgccgcggaccttatcgagatacagaggagccagggtttcgttggtgaccaacatgacctgctcgccgcttttcagcggtaagaaactagctggttcattaaacaaaccagatgcgatggtaattgggtaactacgttccccgagagtaacgacaatcctctccataacgcgacatccaccttaattactgtacccgcagacgagtgtatataaagccagaattagttgctttccagcatgtgaataatctggtttgcaaccactttagcgctttgatcatcagtacgaatggtcacgtcggcaatctcttcatacagcggattgcgttcattggccaacgcttccagaacttcacgcggcggtgtttcaacgtgcagcaacgggcgttttttatcacgctgcgtgcgtgcaagttgcttttcgatggtcgtttcaagataaacgacaacgccacgagcggaaagacggttacgcgtttcacgggatttcacagagccgccgccagtagccagcacaataccctgtttctcggtcaactcattgatgaccttttcttcgcgatcgcggaagccttcttcgccttctaaatcgaaaacccagcccacatcagctccggttcgtttctcaatctcttgatcggaatcgtaaaattccatattgagttgttgagctaactggcgcccaatagtgctttttccggcacccataggcccaaccagaaagatattgcgtttctctgccattttttcggtactactaagactattcgttaatgataaacccgcttcgctcagagagcgccgcaggacatgaactgaaacctcataagatattgcgagagtcagactgaaaattatctcaatactccagcgggtttggcaactgaataaatcacccatccctctgcatatctggtcgctgcaagcgcgctgccttgctaccaccgctctggcgataaatcaccgggtaagattagcgtaaaaaagacagcaaaatgccgcctgaatgataaatcatcatcatggaacgcaggcagcgaagagcaccaactctcaaatcggtactccttgtatgctaaatacctgcgcgcgtcaaatagatgaaacacgttcagcgtaaaaacattaccgcttttacggctgtttactcactggaaaccagtcgtggcgtgataaacaccactaactcgcgtcgttcatcttcttttccgtcatgacgaaatgattgcccgaaccagggaatgtcgccaagcaacggtacgctatcctgaccgcttttatttttacgggtaaaaatgccgcccagcgccaacgtttctccgcttttgacctcgacctgcgtttcgatctcctgcttatcaatcgccagcacttcgccatcggcctgctgtagcacctgccccggaacgttctggctgatgtgtaatttcagccggatgcgacctttttgtaacaccgtgggcgtgacctccatccccaggacggcctctttaaattccacgctcgtcgcgccactttccccgctggaaacctgatatggaatttcgctcccctgtttaatgctggcaggctgaagatgactggccagcagacgcggactggcgataatatccagctgctgtttttgttcgagcgcggaaagctcaagatccagcaagcgtccgttgatgcgcccaatgttaaaaccgacatgcgttgtcgccgtcgctacggagaggtcgctaccaagcgtggtgacttgcccaacgccaccagcgtgttgcgcatcggccagcgtccatttcacgcctaactcacgcaaacttttttcattaatggtgacaatatgcgcgctcagctcaacctgcccgaccggcagatccatttgcgctacccactgttcaagcgcgcttaacgccgttttgttatctcgtagcaaaaggcgattggtgcgtttatcgacggtcatactccctttggcactcagcagcttctcccccgctttcgccagttctcccgcgtcggcgtattgcagggttatactgcgattttccagcggcagatttgcctgcgcccgcgcctgctccgcctcctggcgggcgatattgttattctgccaggcaatggaatgcacactgagaatgttgccttcctgccgcgttatcagtccggcgcttttcactacagtttgtagtgcctgcttccagggaacatctgttagatgtaagctcaccgtaccgctgacgtctgggctcacgaccaggttcaacttctcctgttcagccagcgcctgcaacacctgagctaccggaacgtcatccaccatcagcgtcactttttgcggctttgccgcctgtacgccgggtatcagcatcaacagtagtgcggctatccattgcttcatttgtatctccttgccgttgccacaaccattgtggcggttcgcagtttgtcccggtacccagcgttagtacgtctggcgtcagctgtaaaattgtccagccgttttccagcacatcgttttgctgcacccgtcgccatttcttttgcccgtcttttattacaccgatgatgcgctcgcctcgccctaccatcccctgatagcgccactggctaagttcgctaatccggcatagatcttccggcggtttaaaagggtcacgcataccggttaaaaggcacaatgcaatacctgccaacaaccagcgtttaaccctcatgcggcgtctccagttgtagcgtgaacaaaagatcatcaccttccacgcttaagctaaaacggctcacgctgacgttgcgctctgccagccgtgtaaatgcgctcggcactgcttcccacagcgttttcaacgccaactcgcctccctgcgcggatggatgccaggaaaccagttgcgcgccggataactgaaaatccagtgggctaaagggcagcgttttttcctcgctgaagggagcggtgtctaccaggcgatacagtgcggcccactgctggtgatgacttgcccgtagtcgaattaatgcgtcgcgctcttcatggtgtgtgctactcagaaaaatgagcgtaactaacatcagcaaccagaatgcccagcaaagctggcggaggcggggacttgtggcgaaccaccagtcaaagaacatgttcatcgctaaccttccttgttaactgatactcaaattgccagcgtccctgcgcatcctgctgcgtggctccccgctgattgagatgaaaagatgcatcctggcggagactcgtttctagtgcgtttaacgcggtaatgcttgttgtcagccccttgatctccagcgttccctgctgccagcttatcgttgtcagccaggcgtgctcgggtaaaagcgccgccagtgcttccagcgcagattgccagtcgcgggtaaattgtcgctggcgctgccgttggctacgctgttcgcgtaactgctgttgctccagcaaacgtggcttcgttatctgtaagctgcgggcgagttgttgttccgcctgaagcaaaactgcgtctatgcgcgcttcggcgctgcctgtcagacgcagtattagcgttatcccgacggccagcagcagaggcgcaacgaacatcagcaaccagaaacgcagaaaagcggtccggcgttgctgtcgccagggcaaaaaattaattggcgggttcatcagtacgccttcccaagcgccagccccagcgcgatggcaaagtctccacctggcggcggtagcggcggctgacgaacagaaacggcctcccagggatcaaatccgccttcgccacatatcgcgacgctttcgggatcaacggataacgctgccgccagctccttcgcgctagtcatccccaccgccagtttgcgcccccagctatagcgcgtcgcccacagccactgttcgttatcacgccaggccagacattgctgatgagaaggtaaaaaaggcaggaatcgctgtaatgcactggcatccggggtgatcgcgctcacatgaacacgcaacctttctgccagagtaagcagcgttgccagctctttgctttgcgcggcagtcacgttataggcgggactgagactgtcttcgctgtaatcgaagcgcagggagtccggatccatatccagctcgcgggccatcgtcccactcagccaggccgtttgctcccgctcaccaagggacatgctcgggcgcggaaaactccgctgtaatgtgcgactggcgggaaacgccaacataatgtgatgacgctgcggcagttcgcgactccacggtaacaacgttttagccagctgctgcgcatcaacaatccgcccatctttgataatgtcgttctccagcggcaaccgccaccagcgttgcaaaaagcattcttttgcgccccgcacgatcgcaaccgctaccgcttcttgctgttgtaaatgcaaaccaatttgccagatcttaaatgccattgtgatgatctccttatcacccgtcactctgacgggtatatcaatgcgtctggcttgcctttatactaccgcgcgtttgtttataaactgcccaaatgaaactaaatgggaaatttccagtgaagttcgtaaagtattttttgatccttgcagtctgttgcattctgctgggagcaggcagcatttatggcctataccgctacatcgagccacaactgccggatgtggcgacattaaaagatgttcgcctgcaaattccgatgcagatttacagcgccgatggcgagctgattgctcaatacggtgagaaacgtcgtattccggttacgttggatcaaatcccaccggagatggtgaaagcctttatcgcgacagaagacagccgcttctacgagcatcacggcgttgacccggtggggatcttccgtgcagcaagcgtggcgctgttctccggtcacgcgagtcaaggggcaagtaccattacccagcagctggcgagaaacttcttcctcagtccagaacgcacgctgatgcgtaagattaaggaagtcttcctcgcgattcgcattgaacagctgctgacgaaagacgagatcctcgagctttatctgaacaagatttaccttggttaccgcgcctatggtgtcggtgctgcggcacaagtctatttcggaaaaacggtcgaccaactgacgctgaacgaaatggcggtgatagccgggctgccgaaagcgccttccaccttcaacccgctctacagcatggatcgtgccgtcgcgcggcgtaacgtcgtgctgagccggatgctggatgaagggtatatcacccaacaacagttcgatcagacacgcactgaggcgattaacgctaactatcacgcgccggagattgctttctctgcgccgtacctgagcgaaatggtgcgccaggagatgtataaccgttatggcgaaagtgcctatgaagacggttatcgcatttacaccaccatcacccgcaaagtgcagcaggccgcgcagcaggcggtacgtaataacgtgctggactacgacatgcgccacggctatcgcggcccggcaaatgtgctgtggaaagtgggcgagagcgcgtgggataacaacaagattaccgatacgctgaaggcgctgccaacctatggtccgctgctgcctgccgcagtcaccagcgccaatcctcagcaagcgacggcgatgctggcggacgggagcaccgtcgcattgagtatggaaggcgttcgctgggcgcgtccttaccgtagcgatactcagcaaggaccgacgccgcgtaaagtgaccgatgttctgcaaacgggtcagcaaatctgggttcgtcaggttggcgatgcatggtggctggcacaagtgccggaagtgaacagcgcgctggtgagcatcaatccgcaaaacggtgccgttatggcgctggtcggtggctttgatttcaatcagagcaagtttaaccgcgccacccaggcactgcgtcaggtgggttccaacatcaaaccgttcctctacaccgcggcgatggataaaggtctgacgctggcaagtatgttgaacgatgtgccaatttctcgctgggatgcaagtgccggttctgactggcagccgaagaacagtccaccgcagtatgctggtccaattcgcttacgtcaggggctgggtcagagcaaaaacgtggtgatggtacgcgcaatgcgggcgatgggcgtcgactacgctgcagaatatctgcaacgcttcggcttcccggcacaaaacattgtccacaccgaaagcctggcgctgggtagtgcgtccttcaccccaatgcaggtggcgcgcggctacgcggtcatggcgaacggcggcttcctggtggacccgtggtttatcagcaaaattgaaaacgatcagggcggcgtgattttcgaagcgaaaccgaaagtagcctgcccggaatgcgatattccggtgatttacggtgatacgcagaaaagcaacgtgctggaaaataacgatgttgaagatgtcgctatctcccgcgagcagcagaatgtttctgtaccaatgccgcagctggagcaggcaaatcaggcgttagtggcgaagactggcgcgcaggagtacgcaccgcacgtcatcaacactccgctggcattcctgattaagagtgctttgaacaccaatatctttggtgagccaggctggcagggtactggctggcgtgcaggtcgtgatttgcagcgtcgcgatatcggcgggaaaaccgggaccactaacagtagcaaagatgcgtggttcagcggttacggtccgggcgttgtgaccagcgtctggattggctttgatgatcaccgtcgtaatctcggtcatacaacggcttccggagcgattaaagatcagatcagtggttacgaaggcggtgccaagagtgcccagcctgcatgggacgcttatatgaaagccgttcttgaaggtgtgccggagcagccgctgacgccgccaccgggtattgtgacggtgaatatcgatcgcagcaccgggcagttagctaatggtggcaacagccgcgaagagtatttcatcgaaggtacgcagccgacacaacaggcagtgcacgaggtgggaacgaccattatcgataatggcgaggcacaggaattgttctgattaaaaaggcgcttcggcgccttttcagtttgctgacaaagtgcacttgtttatgccggatacggcgtgaacgcgttatccggctaacaaaatcgtgaaaactcaataaattgcagaaaccccataagcctgataaacattgtgcatcaggcaaacttcacgcatttacactcgcccctgccctttcaaccattcgcgcacgaggaacagcgcactgacattgcgcgcttcattgaagtcagggtcttccagccaatccatcatatgcgccagcggccagcgcacctgtggtagcggctctggctcatcgccttccagactttccgggtagagatcttgcgctaccacgatattcattttgctggaaaagtaagacggtgccatgctgagcttcttcaaaaaagtcagatcgttcgctccaaatccaacctcttcttttagctcgcggttagcggcttcgtagacgctttcacccggatcaattaatcctttgctaaaacctaattcgtaggattcagttcccactgcgtattcgcggatcaggatcaggtgatcgtccacaatcggcacaatcatcactgcttcccggttggttggacgcattcgttcataaacacgccgcacgccattgctgaactccagatccacgctctcgacggtaaacagtcgggaacgggctacagtttcaacattcagaatggtgggtttttgtaaacttttgctcatcgtgggatctatgctgtgaaatcagcggttattgtgcgatatcggacacgctttcggcaatgtgaattgcatgttatttacatttatgtaacttaataaataatcgtcctcaaatcaaattaaaagtcaataggttgaaataactccaggaatttgctgatattccgccttcagagggtttgctatgatcagcggttactgtgatgtgcttaatgatgctcaagttaaactccacgcttgccgatagccaaccgcagaatcatgtattgtgtccggtgcgactgaccacgcctgacagactaagtaagatggggaaagcatgagcaccattgtgatttttttagctgctttgctggcctgcagtctacttgcgggatggctgataaaagtgcgatccagacggcgtcagctgccctggaccaacgccttcgcggatgcgcaaacgcgtaaactcacacctgaagaacgtagcgccgttgaaaattatcttgagagcctgacgcaggtattacaggtgcctggcccaacgggagccagcgcggcaccgatctctctggcgctgaatgccgaaagcaacaacgtcatgatgctgacacacgctatcacgcgttacggcatctctaccgacgatccgaataaatggcgttactacctcgatagcgtagaagtccacctgccccctttctgggaacagtacatcaacgatgagaataccgttgaactgattcataccgatagcctgccgctggttattagtctcaacggtcatacgctgcaggagtacatgcaggaaactcgcagctatgccttgcaacctgttccgagtacgcaggcgagcattcgcggggaagagagtgagcaaatcgagctactcaatattcgcaaagaaacgcatgaagaatatgcgctgagtcgtccgcgcgggctgcgtgaagcgttgctgatcgtcgcctccttcctgatgttctttttctgcctgattaccccggatgtatttgttccgtggctggcaggcggcgcgttactgctgctgggcgcaggtctgtgggggctattcgcgcccccggcaaaatcctccctgcgggaaattcattgtctgcgcggtacaccccgtcgttggggattgtttggcgaaaacgatcaggaacagatcaacaatattagtctcggtattatcgacctggtctatcccgcacactggcagccatacattgctcaggatctcggtcaacaaaccgatatcgatatctatctcgaccgccatgtagtgcgtcagggacgatatcttagcctgcatgatgaagtaaaaaactttccgttacagcactggctgcgcagtacgattatcgctgcgggcagcctgctggtgctgtttatgctgttattctggatcccgctggatatgccgctgaaattcactctcagttggatgaaaggcgcgcagaccattgaagccactagcgtaaaacaactggctgacgctggcgtgcgggtaggcgatacattgcgtattagcggtacgggaatgtgtaatattcgaacttccggaacctggagcgcgaaaaccaatagtccttttttaccgtttgactgcagccagatcatctggaacgacgcccgcagtttgccattaccagaatctgaactggtcaacaaagcgacggcattgactgaagcagttaatcgccagctgcaccctaaaccggaagatgaatctcgcgtcagtgccagtttacgtagtgcaattcaaaaatccggcatggtattgcttgatgattttggcgacattgtactgaagacagcggatttatgttctgccaaagatgactgtgtgcgactgaaaaatgcgctggtcaatctcggcaacagtaaagactgggacgcgctggtaaaacgcgccaacgccgggaagctcgatggcgtgaatgtgttattacgcccggtgagtgcggaaagcctggataacctggtggcaacctccaccgcgccgtttatcacgcatgaaacggcgcgagcggcacaaagtctaaacagtccggcccccggcggattcctgattgtcagcgacgaaggcagcgattttgttgatcagccctggcctagcgcaagtctttacgactacccgccgcaagaacagtggaacgctttccagaaactggcacaaatgctgatgcatacgccgtttaacgccgagggtatcgtcacaaaaatcttcactgacgccaatggtacgcagcatattggccttcatccgatcccggatcgttccggcctgtggcgctatctcagcaccacattgctgctactgacgatgctgggtagcgccatttacaatggcgtacaggcctggcgtcgttaccagcgtcatcgcactcgcatgatggagattcaggcctattatgaaagctgcctgaacccgcaactgatcacccctagtgaaagccttatcgaataacacgtttgcgcggcaggttatgctaccctgtcgcgcaaattgcttcactctggagatttccctcatgcatatcaacattgcctggcaggacgtagataccgttctgctggatatggacggcacgttgctcgacctcgccttcgataactatttctggcaaaagctggtgcctgaaacatggggcgcgaaaacggggttacgccacaggaagcgatggaatatatgcgccagcaatatcacgacgtacagcatacgctaaactggtactgtcttgattactggagtgagcaactgggtctggatatctgtgcgatgaccaccgagatgggaccgcgtgccgtactgcgtgaagataccattccgtttcttgaggcactgaaagccagcggtaagcagcgaattttgctcaccaatgcgcatccgcacaacctggcggtaaaacttgagcataccggtctggacgcacaccttgatttattactttccacccacacatttggttatccgaaagaggatcagcggttatggcatgcggtggccgaagctacgggtctgaaagctgaaagaacgctgtttattgatgacagcgaagcgattctcgatgctgccgcgcaatttggtattcgttactgcctcggcgtgactaatcctgattccgggattgccgagaaacagtatcaacgccatccgagtctgaatgactaccgccgcctgatccccagcctaatgtgaaggagacgccatgaaagagaaacctgctgttgaggttcgactggataaatggctatgggctgcccgtttttataaaacccgcgcgctggcccgtgaaatgattgaaggcggtaaggtgcattacaacgggcagcgcagcaagccgagcaaaatcgtcgagctgaatgccacgctcactctgcgccagggaaatgacgaacgcacggtgattgtaaaggcgattactgaacagcgtcgccccgccagcgaggcagccttgctgtatgaagagactgcggaaagtgtagagaaacgcgaaaaaatggcgctggcacgtaaacttaatgccttaaccatgccgcacccggaccgacgcccggacaaaaaagagcgccgcgacctgttacgatttaaacacggcgacagtgaataactgtcacctgcaagagagatgattatgccgcaacatgaccaattacatcgctatctgtttgaaaactttgccgtgcgcggcgaactggtaaccgttagcgaaaccctgcaacagatccttgagaaccacgattatccgcagcccgttaaaaacgtgctggcagaactgctggttgcgaccagcctgttaaccgctacgctgaagtttgatggtgatatcaccgtacagctgcagggcgacggtccgatgaatctggcggttattaacggtaacaataaccagcagatgcgcggtgtggcgcgcgtgcagggcgaaattccagaaaatgccgacctgaaaacgctggtcggcaatggttacgtggtgatcaccattaccccgagcgaaggcgaacgctatcagggcgtagttggtctggaaggtgataccctggcggcctgcctggaagattactttatgcgttctgaacagctgccgacgcgcctgtttattcgcaccggcgacgtagacggcaaaccggctgcaggcggtatgttgttgcaggtaatgcctgcgcaaaatgcccagcaggacgactttgaccacctggcgacgctaaccgaaaccatcaaaaccgaagaactgctgaccttaccggcaaacgaagtgttgtggcgtttgtatcacgaagaagaggtgacggtttacgatccgcaggatgtggagttcaaatgcacctgcagccgtgaacgttgcgccgatgcgctgaaaacgctgcctgatgaagaagttgatagcatcctggcggaagatggcgaaattgacatgcattgtgattactgcggtaaccactatctgttcaatgcgatggatattgctgaaatccgcaacaacgcgtctccggcagatccgcaagttcattaatgagtatgtccggcagagagggctctgccggattttacgactaatacacctgatgcgctttgtcactcattcagattcacattcagcctttcaccatccactacaagatcgcgccacgctttaggcttcgtccccagttttccatccttcgcagctgtgagtaatttttctttcgttatttcgttcggaagtaaactcatatcaagcgcgtcccattcttttctgtcactgtcaaagccatagacaatgactctgtcatcattaaaagcaaacaggatccgctccgcctgaccatcactattcagatcttgctcgaccaggacgcaggcgtctttttcaatacaggtcatcacgttatagcgatcctggattaaggcgctccagaatgtcgcatcaggtttaacagaaccaggggcaattaacacattatcggctaatactttttcgcttacctgttgctgaagatgttgctctccatctaacgccatcagcagatcccgcgcgcgtttcgggtctttcataaacccggcatcgcttttcaggctctcaagcgcagcacgtccatagcgaccgctctgctcgagcatgtagatagttacctggtcactcgtgtttttgccgctctgataacgcgccatatggctgttcacgctaatgcgcatactgtccagcaccgggctattaagaagcaccagtatcaccaacaccaataagctaaccgcaaggttcactttgccctgaagaacaacgggattttgccctttacgccagacgatgctgacaaaataccccaggctccacaccagtaacaccagcaccgccagcacgccctgcaagcggtcgacagtccagccgtactgagcgacccgcagccataacgcccaggcggcgacgaacacatacagcggagcaaccagcaaagcggttttaatcaggcaacgcaacggccctgtccagggaagactcgctttttgcggatcgcggacaatagccattaagatcaattgcaaaaaggccagcgtcaacagcaacccggcggcggagatgtggcgagaaatcgcgctcaggcccgtaaacggcagggtgatgataaacatcagggttagcaaacttactaacggcagcaaccccgtggcgattaacgtgaacaacttttgaatagagtcgattaaacgactctgtgttcgcgcgaggatcaccgccagcgcggtaaccagacctaacgtgagataaataaaccagtcggttgcaaaaaagagcgtattgaaaaacgtgatgccaacaagtttaaacaactcactccacagtaaaagcaccagccacgtcaagccattggcgagaaaaatcaccagtaatataagtacgttatgccatacactctggtaaaaatagcgatagcggctactgtcattgcggatgcgaaggctttgttgtatccacggtagcaacaacattgccatcaacagcagatagcaaccaaaatcccaaagcgccttttcagctctccaggggttcatgccatcagtttgccacttcagccagccgctcatccccagcgtggcaataaacactagcgccagccatccccaaaggcgcttctgtttaaaagagatcacggagaagagtaaaacggaactaaacgcgacggtcgcaggcacgccataaacaatccaactgtgattttttccggaaagccaggcgatcagcaggtagcaaaccagaccctgaagtaatccggtagcaatcatcccccagcgtgttgcgggactaagttcaacgttatccatgttggttatccagaatcaaaaggtgggttaattatcgcatccgggcagtagtattttgcttttttcagaaaataatcaaaaaaagttagcgtggtgaatcgatactttaccggttgaatttgcatcaatttcattcaggaatgcgattccactcacaatattcccgccatataaaccaagatttaaccttttgagaacattttccacacctaaaatgctatttctgcgataatagcaaccgtttcgtgacaggaatcacggagttttttgtcaaatatgaatttctccagatacgtaaatctatgagccttgtcgcggttaacacccccaaaaagactttactattcaggcaatacatattggctaaggagcagtgaaatgcgcgttaacaatggtttgaccccgcaagaactcgaggcttatggtatcagtgacgtacatgatatcgtttacaacccaagctacgacctgctgtatcaggaagagctcgatccgagcctgacaggttatgagcgcggggtgttaactaatctgggtgccgttgccgtcgataccgggatcttcaccggtcgtagtccaaaagataagtatatcgtccgtgacgataccactcgcgatactttctggtgggcagacaaaggcaaaggtaagaacgacaacaaacctctctctccggaaacctggcagcatctgaaaggcctggtgaccaggcagctttccggcaaacgtctgttcgttgtcgacgctttctgtggtgcgaacccggatactcgtctttccgtccgtttcatcaccgaagtggcctggcaggcgcattttgtcaaaaacatgtttattcgcccgagcgatgaagaactggcaggtttcaaaccagactttatcgttatgaacggcgcgaagtgcactaacccgcagtggaaagaacagggtctcaactccgaaaacttcgtggcgtttaacctgaccgagcgcatgcagctgattggcggcacctggtacggcggcgaaatgaagaaagggatgttcagcatgatgaactacctgctgccgctgaaaggtatcgcttctatgcactgctccgccaacgttggtgagaaaggcgatgttgcggtgttcttcggcctttccggcaccggtaaaaccaccctttccaccgacccgaaacgtcgcctgattggcgatgacgaacacggctgggacgatgacggcgtgtttaacttcgaaggcggctgctacgcaaaaactatcaagctgagcaaagaagcggaacctgaaatctacaacgctatccgtcgtgatgcgttgctggaaaacgtcaccgtgcgtgaagatggcactatcgactttgatgatggtagtaaaaccgagaacacccgcgtttcttatccgatctatcacatcgataacattgttaagccggtttccaaagcgggccacgcgactaaggttatcttcctgactgctgatgctttcggcgtgttgccgccggtttctcgcctgactgccgatcaaacccagtatcacttcctctctggcttcaccgccaaactggccggtactgagcgtggcatcaccgaaccgacgccaaccttctccgcttgcttcggcgcggcattcctgagcctgcacccgactcagtacgcagaagtgctggtgaaacgtatgcaggcggcgggcgcgcaggcttatctggttaacactggctggaacggcactggcaaacgtatcagcattaaagatacccgcgccattatcgacgccatcctcaacggtagcctggataatgcagaaaccttcactctgccgatgtttaacctggcgatcccaaccgaactgccgggcgtagacacgaagattctcgatccgcgtaacacctacgcttctccggaacagtggcaggaaaaagccgaaaccctggcgaaactgtttatcgacaacttcgataaatacaccgacacccctgcgggtgccgcgctggtagcggctggtccgaaactgtaatgatttgaagctggagaatatctatccagtatcttatagaaagcaaaacgggaggcaccttcgcctcccgtttatttacccttcttttgtcgtgccctgcgcccgcgttaccggcactggcagccaggcgcgaatggaaagcccgccccgctcgctggtgccaagctccagcatcccgttatggttatccacgatacgctgcacaattgccagccctaatcccgtgccgctaatggtgcgcgcactgtcgccgcggacaaacggctggaacaggtgcttacgttgttccggcgcaattcccggaccgtcatcttccacctggaaccaggcgcgattcggctccgttccgctgctgactttgatccagccattgccataacgggcggcgttgaccaccatattcgccaccgcgcgtttgatgctcagcgggtgcattttcacttcaatgctgccggggtaaagcgcggtttcaatttcccgctcatagccactttcggcagcaatcacctcaccgagtactgcattaagatccgccatttccatcggcatctcctgcccggtgcgcaggtagtcgataaactgctcaatgatggcgttgcactcttcgatatctttattgatgctttctgccagatagccatcctgctcgctcatcatctcagtcgccaggcgaatacgcgtcagcggcgtgcgcaagtcgtgacttacccccgccatcagcagcgtgcggtcatccgccagttgcttaacaccagccgccatatggttaaaggcacgggtaacggaacgcacctcgctagcgccatactcacgcagcggcggcggaataatccctttaccaacctgcaaggctgcgtgttcgagatcgaccaacggtcggttctggatacgaataaacagccacgccccgcctatcgccaatagcataatcgccagcgtatagcggaacagcggagagaaatcgccctgatgaatttcggtcagcggcacgcgtacccagatattggggctcagccaggttttcagccagacgacagggctacttttgttgacctcaacgcgcacttccgtcgggccgcccagttgctgcgccatctgatggcttaagaattcatagtgttgcgcccaacgcagacctgcctcttcggcagcctcgttggagtagagagagatccccagctcacggtagatctcccgacggaaagcgggaggcacaaccaactgcgtgccgtcctccagttgcagtttgtcggtcatcaacatacgcacttcgtacgcgaggactttattaaactgctggaggctcggcaaaatcgcgaagttcagcaccaccagataagtcgtcaccaggctggcgaacagcaaggtgacgatgagcaataacgtacgggcaaaactacttcgtgggctgaagcgcaatcgcctcatgctttagagccgtccggtacaaagacgtagcccagaccccagacggtctgaatgtaacgcggatgcgctggatcttcttccaccatgcggcgcagacggctaatctgcacgtcgatggagcgttccattgcggaatattcacgaccacgggcaaggttcatcagcttatcgcgggagagcggctcacgcggatggctgaccagtgccttcagtaccgcaaactcaccgctggtgagcggcatcggctcgtcttcgcggaacatttcgcgcgtaccgaggttaagtttgaacttaccgaaagcaattaccgcctcttcctgactcggtgcgcctggcagttcgttcgcctgacgacgcagcaccgcacggatacgggccagcagttcacgcgggttaaacggttttggaatgtagtcgtcagcgccaatctccaggcctacgatacggtccacttcttcccctttcgccgtcaccataatgatcggcatcgggttgctctgactacgaagacgtcggcaaatgctcaagccatcttcaccaggtaacattaaatccagtaccataagatggaaagattcacgagtcagcaggcgatccatctgttctgcattagcgacgcttcgaacctggaagccttgttcggtgagataacgttccagcagcgcacgcaggcgcatgtcgtcatcgaccaccagaatcttgtagttctcttgcattgtttgtactcccaaaggttcgcaacaatttgtaagcgtgtattcttaaaaaagctcacgttcgtcaccagctaaatctggtatgaatttcagcctaaattgttacaaagcatattaaacagcagcttaagtatacaatttattcggcgaaacattattgattctgttgatatgatcacgttatacccaatgtgcgcattatcaaacagacaaagggaatcaacgagatgaaaacgcccctggttacccgggaagggtatgaaaaactcaaacaagagcttaattatctctggcgtgaagaacgcccggaggtcacaaaaaaggtgacctgggccgcaagtctgggcgaccgcagcgaaaatgctgactatcagtataataaaaagcgtctgcgtgaaatcgaccgtcgcgtgcgctatctcactaaatgcctggaaaatctcaaaatcgtcgattactcccctcagcaggaaggcaaagtcttttttggcgcgtgggtggagattgaaaacgacgatggcgtgactcaccgtttccgtattgtcggctacgatgaaatttttggccgtaaagattacatctctatcgattccccgatggcccgcgcattgctgaaaaaagaagtcggcgatctggcggtggtgaatacccctgccggggaagcgagctggtatgttaatgctatcgagtacgtgaaaccgtaaggaagagtcttaacctcctgccgatggctggcatttttgccagccagtccgtataactatcccctgatttttgatccgaaaagatgaactcaaaccatgatgaatgatagcttctgccgcattattgcgggtgaaattcaggcgcgcccggaacaggttgacgctgccgttcgcctgcttgacgaagggaataccgtgccgtttatcgcacgttatcgtaaggaaatcaccggcggtctggatgacacgcagctgcgtaatctggaaacgcgtctgagctatctgcgcgagctggaagagagacgtcaggcgatcctcaagtccatttccgagcaaggcaaactcaccgatgatctggcgaaggccatcaacgccaccctaagcaaaaccgaactcgaagacctctacctgccctacaaacctaaacgccgcacccgcgggcaaatcgccattgaagcagggcttgagccgttggctgacctgctgtggagcgatccgagtcacacgccagaagtcgccgctgcacaatatgtttatgccgataaaggcgtggcagataccaaagccgcgctggatggcgcgcgctatatcctgatggaacggtttgccgaagatgccgcgctgctggcgaaagtgcgtgattatctgtggaagaacgcgcatttggtttctacggtggtgagcggtaaagaagaggaaggggcgaaattccgcgactatttcgatcatcacgaaccgttgtccacggtgccttctcaccgcgcgctggcgatgttccgtgggcgtaacgaaggcgtacttcagcttagcctgaatgccgatccacagttcgatgagccgcccaaagagagctattgcgagcaaatcatcatggatcaccttggcctgcgcctgaacaatgccccggcggatagctggcgcaaaggcgtggtgagctggacgtggcgcatcaaggtgctgatgcatctggaaaccgaactgatgggcaccgtgcgcgaacgtgcggaagatgaagcaatcaacgtctttgcccgtaacctgcacgatctgctgatggcggcccctgccggactgcgtgcaacgatgggcctcgatccgggtctgcgtactggggtaaaagtggcggtggtcgatgccactggcaaactggtggcgaccgacaccatttacccgcacaccggacaggccgcaaaagcagcgatgaccgttgctgcgctgtgtgaaaaacataacgttgaactggtagcgatcggtaacggtacagcttcccgcgaaactgagcgtttctatctcgatgtgcagaagcagttcccgaaagtgaccgcgcagaaagtaatcgtcagcgaagcaggcgcgagcgtttacagcgcttccgagctggctgcacaggagttcccggatctcgacgttagcctgcgtggcgcggtgtctatcgcccgccgtttgcaggatccgctggcggagctggtgaaaatcgatccgaaatctatcggcgtaggtcagtatcagcatgacgtcagccagacgcaactggcccgcaaactggacgcagtagtagaagactgcgtaaacgccgttggcgtcgatctcaacactgcttctgttccgctgttaacccgcgtggcgggcctgacgcgcatgatggcgcaaaacatcgttgcctggcgcgatgagaacggtcagttccagaaccgtcagcaactgttaaaagtgagccgtctggggccgaaagccttcgagcagtgcgcgggcttcttgcgcattaaccacggtgataacccgctggacgcgtctaccgttcacccggaagcctatccggtggtggaacgcattctggcagcaacacagcaggcactgaaagatctgatgggtaacagcagcgaactgcgtaacctgaaagcgtctgactttactgatgagaaattcggtgtgccgacggtaaccgacatcatcaaagagctggaaaaaccgggtcgcgatccgcgtccggaatttaaaaccgctcagtttgccgatggcgtcgagacaatgaacgacctgcaaccgggtatgatcctcgaaggcgcagtgaccaacgtcaccaactttggcgcgtttgtcgatattggcgtgcatcaggacggcctggttcacatctctagtttgagcaacaagtttgtggaagatccgcataccgtggtgaaagcgggcgacattgtgaaggtgaaagtgctggaagtggatcttcagcgtaaacgtatcgccctgactatgcgcctggatgagcagcctggcgaaaccaacgctcgtcgcggcggcggtaatgaacgcccgcaaaacaaccgcccggcagccaaaccacgcggtcgtgaagcgcagcctgccggtaatagcgcgatgatggatgcgctggcggcggcaatgggcaaaaaacgttaaacgcccgtactggcctacggttcgaatttgcacgaaatcgtagggcagataaggcgttcacgccgcatctggcaacgaacgccttgcctgacataaaagtgccggagaatatctccggcatttttattccacagccaaactcataatatattccggcaatatttatcatttcattaacaactgaaaccttaattaaacattagccagtccgggtaattcactattcgaattatattttcgctgcgatataaccttgagccacatcaacattgagtcagattattattcaaaccaacattcgcacacattttaagtattgctgatagaaaccattctcattatcattgtgttgttgattatttaatctctcctttgttggcaaatcatctggtctcatgtcgctgtcaaacgccccatgaggtagttatccagttaatgagaaacaagtaggcacctatgcaatacactccagatactgcgtggaaaatcactggcttttcccgtgaaatcagcccggcatatcgccaaaaactgctttctcttggcatgttacctggctcctcttttaatgtggtgcgcgtcgctccactcggcgaccccattcatatcgaaacccgtcgtgtgagcctggtattacgcaaaaaagatctggccttattagaagtggaagcggtttcctgttaatacggtgataacaacaatgaaaaaattaaccattggcttaattggtaatccaaattctggcaagacaacgttatttaaccagctcactggcagtcgtcagcgtgtaggtaactgggctggcgttaccgtcgaacgtaaagaagggcaattctccaccaccgatcatcaggtcacgctggtggacctgcccggcacctattctctgaccaccatcagtagccagaccagcctcgatgagcaaatcgcctgtcactacattttgagtggcgacgccgacctgctgattaacgtggtggatgcgtctaaccttgagcgtaacctgtacctgacgctacaactgctggaactcggcattccctgcattgtggcactgaacatgctcgacattgccgagaagcaaaatattcgtattgaaattgatgctctgagcgcgcgtctgggctgtccggtgatcccgctggttagtacccgtggtcgcggtattgaagcgctcaagctggcgattgatcgctataaagctaacgagaatgtggaactggtgcattacgcacagccgctgctcaacgaagcagatagtctggcaaaagtgatgccttccgacatcccgctgaaacaacgtcgctggctgggcctgcaaatgctggaaggcgatatctacagccgcgcctacgccggtgaagcgagccagcatctggatgccgccctcgcccgtctgcgtaatgagatggacgatccggcgctgcacattgccgatgcgcgttaccagtgcattgctgccatctgtgatgtggtaagcaacaccctgacggcagaacccagccgtttcaccactgcggtagataaaatcgtgctcaaccgtttcctcggtctgccgattttcctctttgtgatgtacctgatgttcctgctggctatcaacatcggcggggcgttacagccgctgtttgacgtcggctccgtggcgctatttgtgcatggtattcaatggattggctacacgctccacttcccggactggctgactatcttcctcgcccagggcctgggtggcggcattaacaccgtgctgccactggtgccgcagattggcatgatgtacctgttcctctccttccttgaggactccgggtatatggcgcgtgcggcgtttgtgatggaccgtctgatgcaggcgctgggcttgccggggaaatcctttgtgccgctgatcgtcggtttcggttgtaacgtaccgagcgtaatgggtgcacgtacgcttgatgcaccgcgtgaacgtctgatgaccatcatgatggcaccgtttatgtcctgcggcgcgcgtctggctatcttcgcagtattcgcggctgccttcttcgggcagaacggtgcgctggcggtcttcagcctgtatatgctgggtattgtgatggcggtgctgactggcctgatgctcaagtacaccatcatgcgcggtgaagcgacgccgtttgtcatggagttgccggtctatcatgtaccacacgttaaaagcctgattatccagacctggcagcgtctgaaaggcttcgttctgcgtgctggtaaagtgatcatcatcgtcagcattttcctgagcgctttcaacagcttcagcctgagcgggaaaatcgtcgataacatcaacgacagcgcgctggcgtccgtcagccgggtgatcaccccggtcttcaagccaattggcgtgcatgaagataactggcaggcaacggttggcctgtttacaggtgccatggcgaaagaagtggtagtgggtacgctcaacaccctctacaccgcagaaaatattcaggacgaagagttcaatccggcagaatttaacctcggtgaagagctgttcagtgcgatagatgaaacctggcagagcctgaaagacaccttcagccttagcgtactgatgaaccccattgaagccagcaaaggcgacggcgaaatgggtaccggggcgatgggcgtgatggatcagaaattcggtagcgcagcagcagcttacagctacctgattttcgtcctgctgtatgtaccatgtatcagcgtgatgggggctatcgcccgtgaaagtagccgtggctggatgggcttctccatcctgtgggggctgaatatcgcttacagtctggcaacattgttctatcaggtcgccagctacagtcagcatccaacttacagcctggtgtgcattctggcggttatcctgtttaacatcgtggttatcggtctgctgcgccgcgcgcgtagccgggtggatatcgaactactggcaacccgcaagagcgtaagcagttgctgcgcagccagcaccaccggtgattgccattaatggctagtcttattcaggtgcgcgatttgctggcgttacggggccgtatggaagcggcccagataagccagacattgaacactccacagccaatgattaacgccatgctgcaacaactggaaagtatgggcaaagccgtgcggattcaggaagaacctgacggctgcctctctggcagttgtaaaagctgcccggaaggaaaagcctgtctgcgcgagtggtgggcgctgcgttaaccttactccatcgcctgttttggaaagcccggtatgcgtctgcatccgggcttttttgcgtgcggctttccataaaaatgcaactcttgcagcacggcgtaagttcctttgaaagcatctcgcagggatgaaaactcgctaatacacaggtgtggagtggcgcgtagagtcgcggcattcaaacaacaggtgaaggaacgccatgagcaaaaagcagagttccaccccacacgatgcgctgttcaaactctttttacgccaaccggacacggctcgtgattttcttgcgtttcatttaccggcacccattcacgcgctttgtgatatgaaaaccctcaagctggagagcagcagctttattgatgacgatctgcgtgaaagctattccgatgtgctgtggagcgtgaaaacggaacaaggaccaggatacatctattgtctgattgaacatcaaagcaccagtaacaaactgatcgcatttcgcatgatgcgttacgctattgccgcaatgcaaaatcaccttgatgctggatacaaaacgttgccgatggtggtgccattgttgttttaccacggtattgaaagcccctatccctatagcctgtgttggctggattgtttcgccgatcccaaactggcaaggcagctttatgcctccgcatttccgctgattgatgtcaccgtcatgcctgatgatgaaatcatgcagcaccgacgtatggcgctgctggagttaattcaaaaacatattcgtcaacgcgacctgatggggctggtagagcaaatggcctgcttattaagtagtggatacgctaatgacagacaaatcaaagggctgtttaattacatactgcaaactggcgacgctgtacgttttaacgattttatcgacggcgttgccgaacgtagtccgaaacacaaggagagtttaatgactattgcggaaagattgcggcaggagggggaacaatccaaagccctgcatatagccaaaataatgcttgaatccggagttcctcttgcagacatcatgcgctttaccgggctgagtgaagaagagttggctgcggcgagtcagtaaagttctgtctcgccatttcaaaagccacttacaccctctgcttcaacgccaccagcaggtgacaaaactcggccggatggctaataaatggcgcatgggccgctttggcgaagatataactttcgctgtgaggccaaagtttatccagcatcggcaccactttgcgcggcaccagaccgtcgagatagccatacaatcgcaaaaacggcatggacacgttttgcagcggctgacggagatcgaccgttttcaggatttccagcccgccattaagcacgtcaacctccggcatcggtaacgccagaacggttttcttcaacgcccgcgcatcctggcgcgccgtttcagtccccatggtttgtaacgccaggaaccgctccactgtacgctgaaaatcatcactgagttgctgctgaaatcccgccagcacgtccggttttatccccggccactcgtcacgagcactaaaacaaggactgctcgccacggtgaccagcgcctgaacacgctcgggatgggttaacgcaatctggcttgccaccagcccgcccagactccagcctaaccaaatggctttatcaggtgcctgttgcagcacggcttcggccatatcagcaagactcagcgcaccaaatccccggctacgcccgaagccgggcaggtcaacaaggtgcagcgtaaaatggctgctaagttcctcgtcaatgcaacgccacacttcggcattcagtccccatccgtgcagcagcacaagatgaacattcccctgacctttggtctgccaccagatgttattcatccgctattgttctcttttgacttacaaggatgaacatatgctaacagtaccgggattatgctggctatgccgaatgccactggcgttaggtcattgggggatttgtagcgtctgtagtcgcgccacccgcacagataaaacgttatgcccacaatgtggattacccgccacacactcccatcttccctgcggtcgctgcctgcaaaaaccgccgccctggcaaagactggtcacggttgccgactatgcgccgccgttaagtccgcttatccaccagcttaaattttcccggcgcagtgaaatcgccagcgccctgagtcgtctgttactattggaagtcttacacgctcgtcgcaccaccgggttgcaattgccggatcgcatcgtcagcgttccgttatggcagcggcgtcactggcgtcggggatttaatcagagcgatttgctgtgtcagccgttaagtcgctggttgcactgccaatgggatagcgaagccgtcacacgtacacgggccactgcgacccagcattttctcagtgcccggctgcgcaagcgcaacctgaaaaatgcctttcgtcttgaattgcccgtgcaaggtcgccatatggtgattgtggatgatgtcgttaccaccggaagtaccgtcgcagagattgcgcagttgcttttacgcaatggtgcggcggctgtccaggtctggtgcctttgtcgaaccttgtaaagcctcgatgatgggcgtattataaccaactaaaatagtcaactattaggccattactatgatccgtatttccgatgctgcacaagcgcactttgccaaactgctggcaaatcaggaagaagggacacaaatccgcgtatttgtgattaaccctggcacgcctaacgctgaatgtggcgtttcttattgtccgccggacgctgtggaagccaccgacacagccctgaaatttgacctgctgaccgcgtatgttgatgagttaagcgcaccatacctggaagatgcagagatcgattttgttaccgaccagttgggttcccagttaacgctgaaagccccgaacgccaaaatgcgtaaagtggcagacgatgcaccgctgatggagcgcgtggagtatatgctgcagagccagatcaacccacagcttgctggtcacggtggtcgcgttagcctgatggaaatcaccgaagacggttacgccattctgcaatttggcggtggctgtaacggttgttccatggtcgatgtgacgctgaaagaagggatcgagaagcagctgctgaacgaattcccggagctgaaaggtgtgcgcgatctcaccgaacaccagcgcggcgaacactcctactactaagttatcccctcttttgtagattgcccgatgcgacgctaaagcgtcatttcgggcctacgttgaacatgtgccagacgttggcgcagcattgctttgtcaaatcctcggttcgtttccccgcgataatatgaccaacctctcataatttaaatttaccccgctctggtgattctcaaacgccagatgttacccgtatcattcacatgggtaccaaacatactcctgacatctgactacaataattagttttagtgggtatcagtcgtggtgccgcaatatctctgttcccgattgggataattagagtttgtcgtcagaaaattgacgttacccataacaaatgaaaggccaggtaaatcatgccattagtcattgttgctatcggtgtaatcttgttgttgctcctgatgatccgcttcaaaatgaacggcttcatcgctctcgtcctcgtggcgcttgctgttggattaatgcaaggaatgccgctggataaagttattggctccatcaaagccggtgtcggcgggacgctcggtagccttgccctgatcatgggttttggcgcaatgctgggcaaaatgctggcagactgcggtggcgcacaacgtatcgccaccacgctgattgccaaatttggtaaaaaacacatccagtgggcggtggtactgaccggttttaccgttggttttgccctgttctatgaagtgggctttgtgctgatgctgccgctggtgtttaccatcgcggcttctgcgaatattccactgctgtatgttggtgtaccaatggcggctgcactgtctgtgacccacggcttcctgccaccgcatccgggtccgactgcgattgccaccattttcaatgccgatatgggtaaaaccctgctgtacggtactattctggcaatcccgaccgtgattctcgccggtccggtttacgctcgcgtgttgaaaggtatcgataagccaattccggaaggtctctacagcgcgaaaaccttcagcgaagaagagatgccgagctttggcgtcagcgtctggacctctctggtgccggtagtactgatggcgatgcgtgcgattgccgaaatgatcctgccgaaaggtcacgctttcctgccggtagcggagttcctcggtgacccggtaatggcaacgctgattgccgtgctgattgcgatgttcacctttggtctaaaccgtggtcgtagtatggatcagattaacgacacgctggtttcttccatcaaaatcattgcgatgatgctgttgatcatcggtggtggcggtgcgttcaagcaggtgctggtagacagcggcgtggacaaatacattgcttccatgatgcacgaaaccaacatttctccgctgctgatggcctggagcattgctgccgtactgcgtatcgcgctgggttccgcaaccgttgcggcaatcactgcgggtggtatcgcggcaccgctgattgcaacgacgggtgttagcccggagctgatggttattgcggttggttccggtagtgtgattttctctcatgtgaacgatccgggcttctggctgttcaaagagtactttaacctgactatcggcgagaccatcaaatcctggagcatgctggaaaccattatcagcgtgtgcggtctggtaggctgtctgctgctgaatatggtgatttgataacactgactgccggatgcggcgtgaccgccttatccggcctacgattcgggatgaattagtaggccggataagacgcgtcaagcatcgcatccggcatcaaccgcactttacttcttcttcgctgcagctctgcgccgtctgtccaaatccttcagcaacttgttcacgccatcatcggcaaacatgctctcaagcgttgcggaaagcttgcgtcgccagtttttatactggtaactggtgccaggaatattcaccggttcggccatatccagccagtcttccggctgtagtcctaacagagcactgttactgtcggcaatgtagcgctgcaaaccacggttcagcgtcggcgtcatgctcatcaagcttgccttatgcccggcacgtttcggcagacaaccatatttatgcagtgcatccagcagcccttgcttcgccagttcgcgatcctgatacagaccgcgcagtaccacttcatccggatacagccccagggttttgcccagcgttagatccccgcactcccagtaaccgcgcagcgttggcaggtcatgtgtcgccgcaaccgccatgctctgctccggatacgctttcggtgcacggaacgtcttctcgtggtcgttttcgaaatagagcactttgtaagagtacacaccgctgctgcgcagcttaccgacaatctctaccggtacggtaccgagatcttcaccaatcaccatacagcgatgacgtttactttcgagtgccagaatgctgagcagatcatccaccggatagtgaacatacgcgccctgatctgccgtctcgccatacggtatccaccacaaacgcagcatgctcatcacatggtcaattcgtaatgcgccgcagttttgcatattggcacgcaacagctcgataaacggttcataggcacgcgcggtgatgatatgcgggtccattggcggtaatccccagttctgccccaacgggccgaggatatccggcggcgcgccaacgcttgctttcaggcaatatagttcacggtcacaccaggtttccgccccaccttccgctacgccaaccgccagatcacgatacaagccaatcggcatttcatagccctggcttatctcccagcaggcggcaaactggctgtaagccagccactgcaaccagagataaaaatcgacgtcatcacgatgttcttcgcagaactgacgcacttctggactatccacgttctgatacatctctggccatgcaggccagccccagcgcatttcgtcctctttcacttgctgggcatgtagcgcatcaaaggctgcctgccagaacaggctgtcgccctgctctgcaacaaactggcgaaacgcggccatctgctcatcatcacgttgcgcgaaacctttccacgccattcgtaatgctgtcatttttagggcggtaaccgtggagtaatcgacccagtcggcatcgcgcgcctgttgcagcgtctgttgcgtggtcggcaactgccaccaggcctgagcctcttcgctaagatggaaatcttcaacggcgttaacgtcgatataaatcacattcagccaacggcgagaagacgggctgtatgggctggcgctctccggatttgccggatagagcgcatgaatcgggttcaggccaatgaagctcccgccacgttttgccacatccaccagcatcgctttgagatcgccaaaatccccaataccccagtttttttcgcttcgcagcgtataaagctgaacgcaggcaccccacagcttttgtttattcagcaacgcctgcggttcgtaacagcgtttcggggcgacaatcacccggcaatgcgcgcgctggtcgtcctgggtgagtgtcagcgtgtgataaccttccggcagcttcgtcggtagattgaacgctttgccccccgttacatggcctttgtactgcgttccttcttcggtggtcagcagccagctatattcgccgctgccctccaccaccatcggcatttttttgccgctggtataaaccatgacattcgggactggcgttaccgccactttcgtggcggtacgttgatgcatcgcgtcaagcaaacgccgtttggtttcggcgctaatgctctgcggtttaccgtgggcattgatgtaattggggctaatccccgccgccagcgcggcattatccagacgtttgctttccatcgagcttccttagcgttttgcctgccagatacgagcctgataatcgcgaatagagcgatcgctgctaaacataccgcagcgggcggtattgaggatcgccgcgcgagtccaggcctcctggtcgcggtacagcacatccacctgcttttgtgcctctacataggctgcgaaatccgccatcaccagatacggatcgccgccctgtttgccgatactgtgcagcatctagtcgaaggcatgcttatcgccgtcgctgtatttaccgctttccagctctttcaatactgcgtccagcaccttatctttcttccgccatttcaccgggtcgtagcctttggccagaattgccttcacttgttccacggtatgaccaaaaataaagatattttcttcaccgactttctcggcgatttcaacgttcgccccatccagcgtaccgacagtaagcgcaccattgagcgccagtttcatattgccggtaccggaagcttctttacctgcagtgctaatttgttcggagatatccgccgccgggatcagtttttccgccgcgctaacgcaataatccggcaggaacaccaccttcaacttatcgccaaccagcggatcgttgttgatcacgtcagccactttgttgatcgcaaagataatattcttcgccaggtagtagcccggtgccgctttcgcgccgaagaggaagacgcgcggtacgcgatcagcctgcgggttttcacgaatttctttgtacaacgccagaatatgcagcagattcaggtgctggcgtttgtactcatgcaaacgtttgatctgaatatcgaaaatcgcctgtggattgatctcaataccggtacgaactttcacaaactccgccagacggactttattcgcctgcttgatctcgcgatattgctgacggaatttcgcatcatcagcgaatttttccagattgatcagctgatcgagatcgttagcccactctttttgcagacttttatccaacagagccgccagtgccgggttgcactgtttgatccagcgacgtggggtaataccgttggtgacgttatggaatttgttcggccatagctggtgatattccgggaacagatctttcaccaccagatcgctgtgcagcgccgcaacaccgttcaccgcgaaaccgccaaccacacacaggttcgccatatgcacttgtttgtcgtgcaccaccgccagtttggcccacactttttcatcgcccggccaggttttctctaccagcgttttaaagcgagtattaatttcgttaataatctgcatgtggcgcggcagtaagcctttcaccagtttcacatcccagcgttccagcgcttctggcatcagggtatggttggtgtaagcgaaagttttgctggtaatggcccaggcgtcatcccagctcatctggtgctcatcgatcagcacgcgcagcagttctggaatcgcgatagttgggtgggtatcgttcagctgaataacttcgtaatccgccagttcgtgcagtttacgccccgccagatgatggcgacgcaaaatatccgctacgctacaggcacactggaagtattgctgcatcaggcgcagctttttaccggcagtatggttgtcgtttggatagagaactttggtcagtttttccgcattgatgccctgctgttcggcacgcaagaaatcaccgtcgttaaatttagtcagatcaaacggatgcgcgtgcgtcgcctgccacagacgcagcggctgcgccacgccattacgatagccgacaacggggagatcccacgcttgaccggtaatggtaaactccggctcccagcgtccgtctttcgtcactttaccgccaatccctacctgcacatccagtgcttcgttgtggcggaaccacgggtagttactgcgatgccagtcatccggcgcttcaacctgtttgccatcgacaaaagactggcggaacaaaccatattgatagttcagaccgtaacccgtcgcagactgaccgacagttgccatactgtcgaggaagcacgccgccagacgtcccagaccaccgttacccagcgccgggtcgatctcttcttccagcaggtccgtcagattgatgtcataagccttcaagctatcctgtacatcctgataccagccgagattcaacaggttgttgcccgtcaggcgaccaatcaaaaactccatactgatgtagttaacatgtcgctgattcgccaccggcttggcgaatggctgagcacgcagcatttcggccagtgcttcactcactgctagccaccactggcgaggagtcatttcagccgcagaatttaagccataacgctgccactgacgactaagcgcttcctgaaattgcttatcgttaaaaataggttgactcataggagttccacttttcttagattttcaacacaacgttatcgctagtttgccaggctcgatgttgaccttcctcatcctgcgggggattaggcagggaggagttgcggggatgagcaaggaaatgtgatctcaaccacttaaagctagtgcaaaccacaggattagcatcaaatcaatgcaatacagcgcagaaaatctgtatctaagtgcaaaaaatggccgttgcgtattttcaaaaagcggaaggtaactctataaattaagtaaaggagtgaaacagtttcataagtaaaatatccagtgtgctccatctcattcttaatagatttattaagatcatctttttagatggcactttcatcaggaatgaagaagaaacccttgcttaaatgaatctgatgaacataagggaaaccagtattcacgctggatcagcgtcgttttaggtgagttgttaataaagatttggaattgtgacacagtgcaaattcagacacataaaaaaacgtcatcgcttgcattagaaaggtttctggccgaccttataaccattaattacgaagcgcaaaaaaaataatatttcctcattttccacagtgaagtgattaactatgctgattccgagtaaactaagtcgtccggttcgactcgaccataccgtggttcgtgagcgcctgctggctaaactttccggcgcgaacaacttccggctggcgctgatcacgagtcctgcgggctacggaaagaccaccctcatttcccagtgggcggcaggcaaaaacgatatcggctggtacagcctggatgaaggtgataaccagcaagagcgtttcgccagctatctcattgccgccgtgcagcaggcaaccaacggtcactgtgcgatatgtgagacgatggcgcaaaaacggcaatatgccagcctgacgagtctcttcgcccagcttttcattgagctggcggaatggcatagcccactttatctggtcatcgatgactatcatctgatcactaatccagtgatccacgagagtatgcgcttctttattcgccatcaaccagaaaatctcaccctggtggtgttgagtcgcaaccttccgcaactgggcattgccaatctgcgtgttcgtgatcaactgctggaaattggcagtcagcaactggcatttacccatcaggaagcgaagcagttttttgattgccgtctgagtagcccgattgaagccgcagaaagcagtcggatttgcgatgacgtttccggttgggcgacggcactacagctaatcgccctctccgcccggcagaatacccacagtgcccataagagcgcacgccgcctggcgggaatcaatgccagccatcttagcgattatctggtcgatgaggttttggataacgtcgatctcgcaacgcgccattttctgttgaaaagcgccattttgcgcagtatgaacgatgccctcatcacccgtgtgaccggcgaagaaaacgggcaaatgcgcctcgaagagattgagcgtcaggggctgtttttacagcggatggatgataccggcgagtggttctgctatcacccgctgtttggtaacttcctgcgccagcgctgccagtgggaactggcggcggagctgccggaaatccaccgtgccgccgcagaaagctggatggcccagggatttcccagcgaagcaattcatcatgcgctggcggcaggcgatgcgctgatgctgcgcgatattctgcttaatcacgcctggagtctgttcaaccatagcgaactgagcctgctggaagagagccttaaggccctgccgtgggacagcttgctggaaaatccgcagttggtgttattgcaggcgtggctgatgcaaagccaacatcgctacggcgaagttaacaccctgctagcccgtgctgaacatgaaatcaaggacatcagagaagacaccatgcacgcagaatttaacgctctgcgcgcccaggtggcgattaacgatggtaatccggatgaagcggaacggctggcaaaactggcactggaagagctgccgccgggctggttctatagccgcattgtggcaaccagcgtgctgggtgaagtgctgcactgcaaaggcgaattgacccgcagtctggcgctaatgcagcaaaccgaacagatggcacgccagcacgatgtctggcactacgctttgtggagtttaatccagcaaagtgaaattctgtttgcccaagggttcctgcaaaccgcgtgggaaacgcaggaaaaagcattccagctgatcaacgagcagcatctggaacagctgccaatgcatgagtttctggtgcgcattcgtgcgcagctgttatgggcctgggcgcggctggatgaagccgaagcgagcgcgcgtagcgggattgaagtcttgagctcttatcagccacagcaacagcttcagtgcctggcaatgttgattcaatgcagcctggcccgtggtgatttagataacgcccgtagccagctgaaccgtctggaaaacctgctggggaatggcaaatatcacagcgactggatctctaacgccaacaaagtccgggtgatttactggcaaatgaccggcgataaagccgccgctgccaactggttgcgtcatacggctaaaccagagtttgcgaacaaccacttcctgcaaggtcaatggcgcaacattgcccgtgcacaaatcttgctgggcgagtttgaaccggcagaaattgttctcgaagaactcaatgaaaatgcccggagtctgcggttgatgagcgatctcaaccgtaacctgttgctgcttaatcaactgtactggcaggccggacgtaaaagtgacgcccagcgcgtgttgctggacgcattaaaactggcgaatcgcaccggatttatcagccattttgtcatcgaaggcgaagcgatggcgcaacaactgcgtcagctgattcagcttaatacgctgccggaactggaacagcatcgcgcgcagcgtattctgcgagaaatcaatcaacatcatcggcataaattcgcccatttcgatgagaatttcgttgaacgtctgctaaatcatcctgaagtacctgaactgatccgcaccagcccgctgacgcaacgtgaatggcaggtactggggctgatctactctggttacagcaatgagcaaattgccggagaactggaagtcgcggcaaccaccatcaaaacgcatatccgcaatctgtatcagaaactcggcgtggcccatcgccaggatgcggtacaacacgcccagcaattgctgaagatgatggggtacggcgtgtaagtttagccggataacgcgccagatccggcttacatctctgcatcattcaatgctcacccgcgttacgccatctgtttctatcaaactaaaccgcaccggcaagaaacgctccaccaccgcgatattggtcagcagatggcaactgggatgggcgaccgtaaattcccccgcgcccgccagcgccatcggtagcaccagttggtcagcaagatattcccccaccgccgccgtgcttgccaggtagcgtttcacctctttcaccaactgtgccgcaaccacctcggcactgacgcgcttttcaccgacgacaaaaaagcgttcggtgatattttcactttcgacttcaaggctgacggtattacccggcccctggtcgcgcggcaggttatgaatattctgttcatgcagggaaaaactccccgccagtgtagcgatttcacgctcagcaacatggcgcggcacaccagctaatagaacttctccacgcatctgcacaatgttcccgcgctcgccaagttgcaaggtgttaaagcttgccacggggctgacttccgttgccaccacaccgcctccggcagggtaaaaaccgtggcgtaacagcgtggtttgctgatgaattcctattttcgccagcagcggctccagcacccggcggataaaatccgcaggcggcgcgctcgggttatcggtgccgccgctcacttcaacacggctaggtccatcggcaaaccacagcgcgggcagcaccgtttgcagcaccagcgtacaacttccggcgctaccgatagcaaagcggtaatcgccgccgcgcacggtgccgggccggaagagcagacgctggctccccagctccgcgccttccacggttgctccgcaaatttccgtcgccgcctttaccgcggtcagatgctggcgcaacagccccggtttcgcccgcccggcacgaatgctggtgatggtaaatggctggccggttatcatgctcaggctcagcgcgctgcgcaggatctgcccgccaccttcgccctgtgcgccatccagcgcaatcatccttttcatcatttatccttttacgcacaccacctgacgcagggtatagataacttccaccagatcgctttgtgccgccatcaccgcatcaatatctttatacgccatcgggatttcgtcgatcacttcggcatctttacggcattccacatgcgcggtggcacgaatttgatcttccacgctgaacagttttttcgctttagttcggctcattacccgcccggcaccgtggctgcagctacagaagctctcttcatttcccagcccacggacgataaagctttttgctcccatgctaccgggaataattccatattgaccagcacgcgcagacaccgcgcctttacgcgtcacgtagatctcttcaccaaagtgctgttctttttgcacatagttgtggtgacagttgatctcttccatcgccagcgtttgtggctgtctgaccgttttctgcgtaatgctctgcaatgccgttaccacgttttccatcatcgcatcgcggttaaggctggcaaaaagctgcgcccaggccacggctttcaggtaatcatcaaagtattccgtaccttccataaagtacgccagatcacggctcggcaacgtctcaagcgtttcctgcatctctttttgtgccagatcgataaagtaagtcccgatggcgttaccaattccgcgactaccggagtgcagcataatccacacctggtcgctctcatcaaggcagatttcaataaagtggttaccggttcccagcgttcccaggtgtttatagttattggtattcaggaaacggggatatttttgcgttaaccactgataaccggcttcaagctcagcccatttagcatcgacgttaacaggtggattttcccaggcacctttatcacgtttacaacggccagtggtacgcccgtgcggcacggccgtttcaatcgcctgacgcagctctgccaggttttcaggcaggtcttccgccgttaacgcggtacgcagcgcgttcattccacagccaatatccacgcccaccgccgccggaataatcgcccctttggtcgggatcacgctaccaatggtggaacctttacccaggtgtacatcaggcattaccgcaatatgtttgaaaataaacggcatcttcgccgtattaataagttgctgacgcgcatcggcctctaccggcacgcctttggtccacatttttaccggggcattttcagtggtcagtaattcgtaattcattttgtttttctcttttcgttgtttgctgtcctgataattgcaaccgtcgtgccagaaaattaaataagcagcttaattttttaattcattgttttaaaaaagattatatctttacgtccgtaaccggagatttcccgcaaagccaatttaccgataatgaaatatcgtcttttataaggatatctaagatgcgtaaaacagtggcttttggctttgtcggtaccgtactggattatgccgggcgcggcagtcagcgctggagtaaatggcgtccgacactctgtttatgccagcaagaaagcttggtcatcgatcgactggaattgttgcacgacgcccgcagccgcagcctatttgaaacgcttaaacgcgatatcgccagtgttagcccagaaacagaagtggtgagcgttgagattgaactgcataacccgtgggatttcgaagaggtctacgcctgcctgcatgatttcgcccgtggttacgagtttcagccagaaaaagaagactatttaattcacatcaccaccggtacccacgtcgcgcagatttgctggtttctgctggcagaagcgcgttacctgcccgcccggctgatacaatctagtcctccgcgcaaaaaagaacagccgcgcggcccaggtgaagtaacgattatcgatctcgatttaagccgttataacgccatcgccagccgctttgccgaggaacgccagcaaacgcttgattttcttaagtccggcattgccacgcgtaacccccacttcaaccgcatgattgagcagatcgaaaaagtggcgatcaaatcccgcgcgccgattctgcttaacggtccaaccggcgcgggcaagagttttctggcgcgacgcatcttagagttaaaacaggcgcggcatcagtttagcggcgcgtttgtggaagtgaactgcgccaccctgcgcggcgataccgccatgagcacgctgtttggtcatgtaaaaggcgcgtttaccggggcgcgggaatctcgtgaaggtttattacgcagcgccaacggcggaatgttgtttcttgatgagattggcgaactgggcgcagacgaacaggcaatgctgctgaaagccattgaagagaaaaccttttacccgtttggcagcgatcgccaggtgagcagtgattttcagcttatcgccggaacggtgcgcgatttgcgccagctggttgccgaaggcaaatttcgcgaagatctgtacgcgcggatcaatctctggaccttcaccctgccgggtctacgccagcgccaggaagatattgaaccgaacctggattatgaagtggagcgccacgccagtctcactggcgacagcgtgcgttttaacaccgaagcgcggcgcgcctggttggcttttgcgacctctccccaggcaacatggcgcggtaactttcgcgaactttctgccagcgtcacgcggatggccacctttgccactagcggacgcatcactctggacgtggttgaagatgagataaaccgtctgcgctataactggcaggagagccgcccctccgcgcttacggcgttgctgggcgcagaggcagaaaacatcgatctcttcgaccgtatgcaactggaacacgttatcgctatctgccgccaggcaaagagcctttccgcagccggacgccagctttttgacgttagccgccagggcaaagccagcgtcaatgacgcggatcggctacgcaaatacctggcgcgttttggtctgacgtgggaagccgtgcaggatcagcacagctccagttgaatatggtggtccgtcagcacctgcatcacgcttactggcggcggggcgtcggtgtagacggcatctaccatgctgatgctgcccatattgaccatcgcgttacggccaaatttcgagtgatcgacaaccagcataacgtggcgcgagttctcaataatggcgcgtttggtgcgaacttcgtggtaatcgaactccagcagcgagccgtcgctatcgatgccgcttatccccagaatgccgaaatcaaggcggaactgggagataaaatcgagcgtcgcttcgccaatgatcccgccatcgcggctgcgtaattcgccaccggcgagaatgatgcgaaaatcttcttttaccatcaacgtgttagcaacgttgagattgttggtgacaatgcgcaaattgctgtgattgagcagtgcgtgcgctaccgcttccggcgtggtgccgatatcgataaacagcgtcgagccattggggatttgctccgccactttgcgggcgatgcgctctttttcttcggtctgggtggccttgcgatcgtgccacggcgtgttaaccgaactggaaggcagcgccgcaccgccatgatggccaggatcaggttttgctccgccagctcattgaggtcgcggcgaatagtctgcgggctgacggagaaatgctctaccagctcttcggtactgacataaccctgctgtttaaccagttcgataataccgttgtgacgttgtgtttgtttcatttataaatccctggaattattttcgttttcgcgcattgaggctatcaacaaaagccatcgctaaacccacggctaacccggcgatgtgtgctccgttcgccatgctcatcccaaacaaatcaaaccatccggcgacaatccagatcagcgcaaagataattaacccacgttgcaggtaaatgccactttgcggatcgcgttcgccacgtagccagacgtagcccatcagcgcatacaccacgccagaaagcccgccaaaccacggcccgctgaatttttgctgcacatagccgcttaacagggcgctgataagcgtaatgacaattagcttaccgctaccgaggcgtttttccaccgcaccgccgagataccaccaccagagcaggttaaagaggatatgcatcaggctgaagtgcattaacgcgtgggtgaagtaacgccagaactcaaatttcagtgttggatcgaatggccaggccagccataacatcacttcctgatcgccgagaatttgcatggcaataaacaccaccacgcaggcgatcatcatcacccaggttaccggacctgcgcgttcacgcaaggcggcaaagaaaggataacggcgataatgcaggccactgccggtatggcctgcctgccagctcgccgccagataacgcggatctgccgggttttcgagaaaacgcgccagctccgcccgtacgcgctcggcctgggactcatccgccagccagacatcgctttggttatgttgttgaatcgtgaggataacaccctgcgtcgccatgtaatcaacaaacgcctgcgccacgcgggggttagcaaaagaggtaatcatcaacatcgttgctgtcgcttattccacacaaaaggggacagtataaagcgttacgcgccgtacgccacctctgcgggaaactgacgttgccaggcttcaaagccgccgtcaatgctatagaccacatcgtagccctgttgcagcagatactgcgccgcgcctttgctgctattgccgtgataacacatcaccatcaccggagtgtcaaagtcgttatcacgcataaaagcgcccagcgtgtcgttggttaaatggaaagcctgcaccgcatgtcccattgcgaaactctgtggatcgcgaatatcgaccagcaccgcctctttttcctgcaacttctggtgcgcgtcggcaacgttaatacattcgaactgatccatgcgtctctctttctttacaaacaagtgggcaaatttaccgcacagtttacgtcgaagcggcagataaacgccataatgttatacatatcactctaaaatgttttttcaatgttacctaaagcgcgattctttgctaatatgttcgataacgaacatttatgagctttaacgaaagtgaatgagggcagcatggaaaccaaagatctgattgtgatagggggcggcatcaatggtgctggtatcgcggcagacgccgctggacgcggtttatccgtgctgatgctggaggcgcaggatctcgcttgcgcgacctcttccgccagtagtaaactcattcacggtggcctgcgctaccttgagcactatgaattccgcctggtcagcgaggcgctggctgaacgtgaagtgctgctgaaaatggccccgcatatcgccttcccgatgcgttttcgcctgccacatcgtccgcatctgcgcccggcgtggatgattcgcattggtctgtttatgtacgatcatctgggtaaacgcaccagcttgccgggaagtactggtttgcgttttggcgcaaatagtgtgttaaaaccggaaattaagcgcggattcgaatattctgactgttgggtagacgacgcccgtctggtactcgccaacgcccagatggtggtgcgtaaaggcggcgaagtgcttactcggactcgcgccacctctgctcgccgcgaaaacggcctgtggattgtggaagcggaagatatcgataccggcaaaaaatatagctggcaagcgcgcggcttggttaacgccaccggcccgtgggtgaaacagttcttcgacgacgggatgcatctgcctagcccttatggcattcgcctgatcaaaggcagccatattgtggtgccgcgcgtgcatacccagaagcaagcctacattctgcaaaacgaagataaacgtattgtgttcgtgatcccgtggatggacgagttttccatcatcggcactaccgatgtcgagtacaaaggcgatccgaaagcggtgaagattgaagagagtgaaatcaattacctgctgaatgtgtataacacgcactttaaaaagcagttaagccgtgacgatatcgtctggacctactccggtgtgcgtccgctgtgtgatgatgagtccgacagcccgcaggctattacccgtgattacacccttgatattcatgatgaaaatggcaaagcaccgctgctgagcgtattcggcggtaagctgaccacctaccgaaaactggcggaacatgcgctggaaaaactaacgccgtattatcagggtattggcccggcatggacgaaagagagtgtgctaccgggtggcgccattgaaggcgaccgcgacgattatgccgctcgcctgcgccgccgctatccgttcctgactgaaagcctggcgcgtcattacgctcgcacttacggcagcaacagcgagctgctgctcggcaatgcgggaacggtaagcgatctcggggaagatttcggtcatgagttctacgaagcggagctgaaatacctggtggatcacgaatgggtccgccgcgccgacgacgccctgtggcgtcgcacaaaacaaggcatgtggctaaatgcggatcaacaatctcgtgtgagtcagtggctggtggagtatacgcagcagaggttaagcctggcgagctaaattaacgtaaggtgatcaggtcagatttcaatctggcctgagactgatgacaaacacaaaactgcctgatgcgctacgcttatcaggcctacgtggtttatgcaatatattgaatttgcatggtcttgtaggccagataagacgttcacgtcgcatccggcatgaacaaagcgcactttgtcaaaaatctaacctactttttaattcagggaattaccgcaaagcccacgccatcatacccaacgtaacaaaactcaggcacgttccccactcgcccgctgaaaaatagcattaatgcgcccagcgccagcataaaaattttgagcagaaggtaaattgttggcgtgataaggatattacaaacttcaataataccggcaagtccgacacccagcatggcaataaccaccgccaaaaattgcgccagtatggggatgccgaaaaaagtcattaccaggctggtcaaaatccattttctgttttgcattattctttccattctttttgaatggtgaaattatactccccgagtccccttgccccttctggacacttttccgaaatgatggcggaaaaaaacgggaccctttggccccgttctatttattggtgaacttacaatctcaccggatcgatatgccagatatgatcggcgtactctttgatagtacggtcagaagagaagtagcccatattggcaatgttcagcatcgcttttgcggtccactcttcctgaagctcgtagagttcatcgactttatcctgacaatcgacatagctgcgataatccgccagtacctggtagtgatcgccgaagttgatcaggctatcaaccagatcgcgatagcgacccggatcttccggactgaatacaccgctgccgatttgcgtcagcacctgatgcagctcctcatctttctcgtagtattcacgcggtttgtagccctgacgacgcagttcttccacttcttccgctgtgttaccaaaaataaagatattgtcagcaccgacatgatccagcatctcgacattcgcaccgtccaacgtaccgatagtcagcgcaccgttaagcgcaaacttcatgttactggtgccggaagcttccgtccctgccaggctaatctgttcagacagatctgccgccggaatgatcaactgcgccaggctaacgctgtagttcgggatgaacacgactttcagcttatcgccaatctgcggatcgttgttgatcactttcgctacgtcattgatcaaatgaataatgtgcttcgccatgtaataggcgctagccgccttaccgccaaaaatattcacgcgcggtacccacttcgcatccgggtcggccttgatgcggttatagcgggtaatcacatgcaacacattcatcaattgacgtttgtattcgtgaatacgtttgatttgtacatcgaacaacgcctttggattcaccaccacattcagctgctgggcgatatactctgccagacgctttttgttctccagcttcgcctgatgcacagcgtgattaaccattgggaaatcacagtgttgttgcagctcattaagcaggctaaggtcggtgcgccagttacggcccaggtgttcgtccagcacggcactaaggcttgggttcgctaccgccagccagcgacgcggcgtcacaccgttggtgacgttggtgaaacgacccgggaagattttcgcaaagtcggcaaacaagctttgcaccatcagattagagtgcagttcgcttacaccgttaactttgtggctcacaacaaccgccagccaggccatacgcacacgacgaccgttggattcatcaatgatgctcgcccgtcccagcagatcggtatcgttcggatactgttcctgcaaggttttcaggaaatagtcgttgatttcaaagatgatctgcaggtgacgcggcagaattttacccagcatatcaaccggccaggtttccagcgcctcgctcatcagcgtgtggttagtgtaggagaagacctgacaacacacctcaaacgcgtcgtcccagctaaattggtgctcatcgatcagcagacgcatcatctcaggaatgctcagtaccggatgggtatcattgagatgaatcgcgattttatccgccaggttatcgtaggttttatgcaactgataatggcggcttaaaatgtcctgaatggtgctggaaaccaggaagtattcctgacgcaggcgcagctcacgcccggagtaggtggagtcatccggatacagtacgcgagatacgttctcggagtggtttttatcttccactgccgcgaagtagtcaccctggttgaatttaccgaggttaatttcgctactggcttgcgcactccacaaacgcagcgtgttggtcgcgtcggtgtcgtaaccagggattatctgatcgtaagcgactcccagaatctcttcggtttcaatccagcgcgtttttttaccttcctgctgaatgcgaccgccaaaacggactttatagcgcgtgttgtggcgtttgaattcccacgggttaccgtattccagccagtagtctgggctctctttctggctaccgttaacgatgttctgcttgaacataccgtagtcatagcggatgccgtaaccgcgccccggcaaccctaacgtcgccagagaatcaaggaagcaagccgccagacgtcccaggccaccgttaccgaggcctgggtcattttcttcatcaatcagctcttcgagatttaaccccatcgcttccagtgcgccctgtacatcttcgtaaattcctaggctcaacatggcgttggagagcgtacggccaatcaaaaactccatgctcaggtagtaaacctgacgagtttcttggctcaactgggcacggttactacgtaaccagcgctccacgagacgatcgcgcacagcaaataacgttgcgttcagccattcatgtttattggcgacgaccgggtcctttccaatcgtaaacatcagcttgtaagcgatagagtgcttaagagcttctacgctaagcgtggggctactatatgtaaacggagcattcatataggcgtttcctgaaaattatttcaagcgatagtaaagctcacggtagctcttcgccgcgacctgccagctaaaatccattgccatagcctgacgttgcacaaaccgccacagactaggacgggaccacagtacaaaagcacgtcgaatagcccgtaacaggctccaggcattactatcttcaaagacaaacccactggcgacgccatctgcaaggttctcaagagaacagtcagaaaccgtatcagcaagcccaccggtgcgccgcactaacggcagcgtaccgtacttcaatccataaagttgcgttaagccgcacggttcaaaacggctgggcaccagaatgacgtccgcgccgcccataatgcgatggctaaatgcttcgtgatagccaatctgaacgcccacctgaccggggtattccgctgccgccgcaaggaaaccttcctgcagcaccggatcgcccgcgccgagtagcgccagctgcccgccctgctccagaagacccggtaaggcttccagcaccaggtcgagacctttctggctggtcagacggctcaccactgcaaaaagcggcactttatcgtcaaccttaagccccattgcgatttgtaactggcgcttattttccgctttatcttccaacgtatcgcgggtgtaacggctggccaacagtaagtccgtctctggactccagattttctcgtccacgccgttcagtacgccggaaagacgcccttcacggtgacgctgttgcaacagaccttccataccgtaggcaaactgcggttcggtgatctcgcgagcgtaggttggactgaccgccgtaatgtgatcggcatagtacagaccggccttcaggaaagagatttgtccgttgaattccagcccatgaatattaaagaaactccatggcaattggatgtcattcatgtgatgtgcataaaacatgccttgataggccaggttgtgcacagtaaacacgctcttcgccggacgcccgcgcgccgccagatacgcaggcgcaaggcctgcatgccagtcgtgcgcatgcaccacatcaggacgccagaatgggtcaagcccgctggccatttctgccccaacccaccccagcagcgcaaaacgcaatacgttgtcggtataggcaaataagttggtatcgtgatacgggcttcccggacgatcatagagatgcggcgcgtcaatcaggtaaatgccaaccccgttgtaatgaccgaacaacagcgtgatatgtccggcgaaggtatcacgacgggatactacctgcgcatcggtcacgccacggcgaatatcgggaaatgcaggcaacagtacgcgagcgtcaacgccgtctgcgatttgtgctgcgggtaatgccccaataacatcagccagaccgccggttttaagcagcgggaacatctcactacatacatgtaaaacctgcattatcgctcctgtttatgccctaacttccgtagcatttcgcgcgttaccagcacgatgccttcttcactacgatagaaacgacgtgcatcttcctctgcgttttcaccaatcaccatgccttccggaataacacaagcacgatcgatgacgcagcggcgcagacggcagctgcgacctacccatacttccggtaacaatacggcggaatcaatgttgcagaaactattcacgcgaacgcggctgaacagaacggactgcaccaccacgctaccggagatcacacaaccgccggaaaccagactgttaagggtcatcccgtggctaccggagcgatcctgcacgaatttcgctggcggtaaactttcattgtaggtgcgaattggccaattgcgatcgtacatatccagttccggcaccacagaggccagatcgaggttcgctttccagtaagcttccagcgtacccacatcgcgccagtacggctcggcatccgggtcggattgtacgcaagagagcgggaacgggtgcgcataggccagaccggcttcggtgatcttgggaatcaaatctttgccaaagtcgtggctggagttctcatcgcgatcgtcttcttccagcagttcatacagatagtcggcgtcaaagacgtagatacccatactcgccagagatttgctcggatcgttcggcatactcggcgggttagcaggtttttcaacgaattcgataattttatcgttctcatcaaccgccataacgccaaatgcggaggcttcttcaatcggtactggcatacaagcaacggtgcaacgtgcgcctttttcgacgtgatcgataagcatacggctgtagtcttgcttgtagatatggtcgcccgccaggatcaccacgtattccgctttataacggcggataatgtcgaggttttgggtgaccgcatctgcggtgccgcgataccagttttcccctttcattctctgctgtgctggcagcagatcgacaaactcgttcatttcttcattgaagaaactccagccgcgctgaatgtgctgcaccagagtgtgggactggtactgggtgatcacgcccatacgacggatcccggagttgatgcagttagacagcgcaaagtcgataatgcggaacttaccgccgaagtgtacggccggttttgctcgcttattggttaaatccttcaggcgggtaccacgtcctcccgccagtatcagggcaacagatttcaatggcagctggcgcgccaacattaagtgatcgttcttctctaaactaaccatgactaactccttttttatcatctctggaacacacacaatccgtgtgcaggtccctgccagacagccgtaatcactgggttatcctctccagcgaatgggggaatggcgtgccactccccagcaggtaaaacaatctctgttacctcaagcgtggcgttaattgcgatcaaaaagcgatcgctgagcagaatttgcagctgtttcggcccgttttgccactcatccgtgcttaaaggttgagcatatcgatttagccaacggacattgccgtcgccttcttcccaccagcgattctccaccaaagcgggaatgcgcttgcgcagatggattaacgcggcggtaaatgcggttaaaccactgcttgcctggctccagtccaaccaggttaattggttatcctgacagtaggcattgttattgccatgctggctgtgaccatgttcgtcaccggccagtaacatcggcgtaccctgggagagcaacaacgttgttaacagggcgtgaatgctgtcgcgccgccgttcaaccaggtcaagagaaccgcctaacccttctttaccatgattgttactgtaattgttgttggtcccgtcgcgattttcttctccgtttgcttcattgtgtttatggttgaagcaaacgcagtcgcgaagcgtaaaaccgtcatgcgcggtgacgagattaatcgcggcactcggcagacgaccattacgtttaaaaacatcgctggaggcagcaaaacgcccggcaaacgcccccagaggcaaatcataatgtagccagaaacgacgggcagcatcgcggaaatgatcgttccactcggcaaacagcggcgggaaatttcccacctgataaccaccaggagcgatatcccacggttcagcaattaacttcacctggctgagcaccgggcagttctggatagcggtaaacaacggcgcatcctgacggaactctggcgtacggcccatgactgccgccagatcaaagcggaaaccatcgacgtggcaggtttctacccaataacgcaggcaggcgctggcataatccaccaccgccggatgactcaaattgagcgtgttgccgcaaccggtccagttgtgataatcgccgtcttctcttatccaataatagctacggttatcgatcccacgcaggctgaataacgggccgtcgaggtccagttccgcactatggttgagcacgatatcaagaatgacttcgatacccgctttatgcagtgctttgattgcatcgcgaaactcatccagcgccgtttctgggctgcaggcatacgccggatgcagcgcaaacatcgccaccgggttgtaaccccagtagttacttagccccatgcgttgcagacgtggttcactggcaaactgcgccactggcagcagttccagcgcggtaatgcccaattgtttcaaatagttgatcatcaccggatgcccgagggctttataagtgccacggatctcgaccgggatctccgggtgcaagtacgttaatcctttgacatgggcttcataaatgatggtgctgccccacggcgtgcgcggcggggcatcatcttcccagtcatagtgatcaaccaccactacgcatttcggcgcaatggcggcgttgtcgcgatagtcaggttcattatgaccggcgtgcagcagcgggttatctttaaactccccgtcaatttgccgcgcgcaaggatcaatcaacaacttcgccgggttaaagcgatgcccctcggcgggttgccaggggccatgaacgcgataaccataacgcaaacccgggcgcgcatccggcagataaccgtgccaaatgtcgccactgtgccctggcaagtcatagcgatgttcctggccattggcgtcaaagacacacagttctacccgctcggcatgagcggagaaaagtgtgaagttgacgccctgaccgtcgtaatgcgcgccgaggggagcgggtttgccaatggcgagttgtgtcattctgcctcccgaaccagccagatagtggccagcggtggtagcgtcaggcttagactatgctgacgaccgtggctggcaatctcatcgctgtgtaccgtgccgccattgcctgcattactgccgtgatagtgcatggaatcggtattgaggatttcacgccatttgcccggctggtttatgccgaagcgataatcatgacgcggtaccggcgtaaagttactggcaacgatgatttcgttaccctctttatcgcgacgcacaaagatcagcacgctgcgttctttgtcatccaccaccagccattcaaagccgtacgggtcaaaatccagttcatgcattgctttatggtggcggtaggtgaggttcagatcgcgcaccagacgctggacaccgtggtgccagttatcgccgccttccaacagatgccagtcgaggctggcgtcatggttccactcgcggccctgggcaaattcgttacccatgaacagtagtttcttgcccgggaatgcccacatccagccatagtaggcgcgcaggttcgcgaatttctgccatgcgtcgcccggcatgcggtcgagaatgctttttttaccgtggaccacttcatcatggctcaacggcaggacgaagttttcagtgtagttgtagagaatcccgaaggtcagtttatcgtgatgatactgacgataaaccgggtcgagcttcatgtagtccagggtgtcatgcatccagccgaggttccacttgtaccagaagcccagaccgcccatatcctgcggacgagaaacgccagggaaatcggtagactcctcagccattgtcaccgcaccggaaacctgctcaccaagaatacggttggtattacgcaagaattcaatcgcttcaagattctcgcgcccgccaaattcgttcgggatccactccccctctttacggctgtagtcgcgataaatcatactcgccaccgcatcgacgcgcagcgcatcaataccaaaacgttcaatccagtaaagcgcgttaccgacgaggaagttactgacttcacggcgaccatagttgtagatcagcgtgttccagtcctgatgatagccttcacgcggatcgctgtgttcatacaagttcgtgccatcaaattcggcaagcgcaaagtcatcagtcgggaagtggcctggcacccagtcgagaatcacgttcagaccagctgcgtgtgcggcatcaatgaaataacggaagtcgtcgcgagtaccaaaacggcgggttggcgcatacaggccggttggctgataaccccaactgccatcgaagggatgctcgttaatgggcagtagttcgaggtgggtaaagcccatccatttagcataaggcaccagttgatcggccagctcgcggtagctcaaccagaaattgttgtcggtgtggcgacgccaggaacccaggtgaacttcataaatagagattggcgcatcaaactgattcgcttttttgcgctcttcagtctgtacaaccttttccggcagcccgcaaataagagacgcggtttccgggcgcatttgcgcttcaaaggcataagggtcggacttcagacgcaagttgccattggcatcaatcatctcgtatttatagagctgaccgttatgcgccccagggataaacagttcccagatgccgctctctttacgcaggcgcatcgggtgacggcgaccgtcccagtagttgaattgcccaaccacgctgacccgacgggcgtttggagcccagacagagaaacgcgtacctgtgacgccatccatagtatctgcatgcgcgcctaaggtttcatacgggcgcaggtgagtaccttcagataatagccaggcatccatttcctggattagcggaccaaaacggtaaggatcatcaatcaggttttgctgaccatgccagacaacagccaactgatagcggaaaaaattcttacgtcgcggaatgacgccgctaaagaatccccgactgtcgagacactccagttttgcgagtttgcgcccggttttcggttcaatcacccacacatcggtagcgtcgggtaaaagggcacggacttccagtcccgcggtggttttatgcattcccagtacggaaaaaggatccgcaaaatggcctgcaattagcgcgttaatcacgtctctatcgatacgatcggacatgcttgtcttcctgttttattgtgtcaccccatccaattggatttttgacttctggttgtgacatttttttgacctgaacggcgcagcactctgtgcatcctctctgcgtcgtcctcacttcaggtaaggctgtgaatactcatgtattcagccacccttaaagaatagccaatgctctatttaactcccggtaaatcatgaaacatctgcgcttactcctgtattacgcactaacaggggcggcatcgcgccccagatttaatgaataaagattacgccagttgacgaagcatccgacgcagcggctccgcggccccccacagcagctggtcgcccacggtaaaggcactcaggaactctggtcccatattcagcttacgcaggcggcctaccggcgtggtcagcgtgccggtaacggcagctggggttagctcacgcatagtgatttcccgatcgttcggaacgactttcgcccacggattgtgcgcagccagcagttcttccacggtcggaatagacacatcttttttcaatttaatagtgaatgcctggctgtggcagcgcaatgccccgacacgcacacataaaccatctaccggaattacggaagatgtgttgaggatcttgttggtttccgcctgccctttccactcttcgcggctctgaccgttatcgagctgtttgtcgatccacggaatcaggctacccgccagcggcacgccaaagttatccaccggcagctcaccgctacgggttaaggttgtgactttgcgttcgatatcgagaatagcagaggacggggtcgcgagttcatctgccacatggccatacagatggcccatctgggttaataactcacgcatatgtcgcgcaccaccgccggaagcggcctggtaggttgcaacggacacccaatcaacaagatcattggcgaataaaccacccaagctcatcaacatcaggcttacggtacagttaccgccaacaaaagtcctgatgccattatttaatccgtcggtaatgacgtcctgattgacggggtcaagaatgatgatggcgtcatctttcatgcgcagagagcttgctgcgtcaatccagtaaccttgccatccgctttcacgaagctttggatagatttcgttggtataatcgccgccctgacaggtcacaatgatatcgagggcctttagcgcctccagatcaaaggcatcctgaagtgtgccagtggttccgccaaaagacggcgcagcctggccaagctgagaagtagaaaagaagacagggcgaatggcgtcgaagtcgcgctcttcaaccatgcgttgcatgagaacggagccgaccataccgcgccagccgataaaaccaacatttttcataagcgtttttttcctgcaaagatgtgtgctgtataaatgtgccggtctcctcttggcacatctttcaccatacaaaaagcagccaaagtcgcaagtgaaattaatcaatgatagcgaagccatcagtaatgcgacttatcctgctttgttagcacgcagaaagtccgcggcaattatcagggaatttgagttatgaatgaaatcatttctgcagcagttttattgatcctgattatggatccgctcggaaacctacctattttcatgtccgtactgaaacatactgaaccgaaaagacggcgggcaatcatggtgcgagagttgcttattgctctcctggtgatgctggtgttcctgtttgcgggtgagaaaattctggcatttcttagcctacgagcagaaaccgtctccatttctggcggcatcattctgtttctgatcgccattaaaatgattttccccagcgctagtggaaatagcagcgggcttccggcaggtgaagagccatttatcgtgccgttggcaattccgttagtcgccgggccgactattctcgccacgctgatgttgttgtctcatcagtacccgaatcagatggggcatctggtgattgctctgctgctggcctggggcggcacctttgtcatcctgctacagtctagcctatttttacgtctgctgggcgagaaaggggtgaacgcacttgaacgcctgatgggattgattctggtgatgatggcaacccagatgttcctcgacggcattcgaatgtggatgaaggggtaacgaggagagtttttcgaaaagaacccggtagcgtcacaactaccgggcgaacaaacttaactcaacagctggaacgcaatcatcccaacgatggcaccgacagtgccgaggatggtttccatcatggtccaggttttcagcgtttcggcttcggtcgcgccggtaaatttaccgaacaaccagaaaccggcgtcgttaacgtggctgacaacaatgctaccaccagcgatacaaatgctcagcgccgccatttgcgcaccggagtagttcagttgttcaataaccggcatcaccagtcctaccgccgttaaacaggctacggtggcagaaccctgaatgatgcgcactgcagctgccagcacgaagcaggtgatagcaatcggcaggcccatgccggttaacgcttcgcccagtgccggacctacgccagagtcaaccagcacctgtttgaacacgccgcccgcaccaatcaccagcagaatgatccccgccggttgcagcgcgtgaccgcaaatctccatcactttgtcttttggcatgccctgacgcattgccagaccgtaaatcgccaccagacaagcaaccagaatcgcggtaaacggatgaccgataaactcaaaccattcgtaagcagtacttccttccggcacaaaacgcgcggcaatggttttcagccctaccagcaccagcggcagcaggatcaggctcaggctgaatccgaaagatggcattttgccttcgccgagatgcggttcgctgatgtcgtcaggaatatgcagctcaacgtaacggctgatgaagttaccccacagcggcccggcaataatcattcccggaattgccgcacacaggccaatcaggatcatccagccaaagtcggcattcatctggcttgccagcagcatcggcgctggtccaggcaccagaaatgccgccgctgccgccacgcctgcaaataatgggattaccagcttcaccaggttcgtaccggtgtggcgcgccatactgaaagcaacgctaatcagcagaactatcgccacttcaaagaacagcggtagcgcacagaccagccccgcaaggccgatggcataatgcgcgcggctgtgaccgaaggatttgagcattttgacggcaatctgatcgactgcgccggtttcatgtaagatcttgccaaacatagctcccagggcgacaaccaccgccaggaagccgagggtgcctcccatccctttttccatcgtcgctgcgattttatcgagcggcataccagaaaaaaggccagcccccatggacaccaccattaaagccaggaaagcgtgcatacgcgccttcatgactaaaaacagcagcagtaaaacagaccctactgctgttaaaacaagcgttaatgtagtcactacttatttgccttttttaataacctcaatggtgcttgccacaacaccttccagcggttgatcgatatccaccaccagtacatcggtttcgtccgcacccggctcctgcagcgtttcaaactgcgtcaccaacatttgggttttaaagaaatggcctttgcgcgctttcaggcggatttcaatcacatcaaaatcgcctttcaaatagatgaaagagagattcggattaccttcacgcagcaagtcgcgatagtgttttttcaatgcagaacagacgatcaggctcactttattagtgcgctgcatagcaaacgcggcgtcgttcagcgcctgcaaccacggtttgcgatcgtcgtcattcagtggttcgccagacgccattttttcgatattgcgccgtggatggaggaaatcgccatcaagaaacgcggcatgaagttgatgcgccacttcactggcgaccgcagatttgccgctgccgcttacgcccatcaagacgtaaatgtggtgatcatggttagtcgtgctcaaagtggtgcccccacaatacaagaattaaaaatgttacgggtaactgttatcggtaacattgtccagccggacaatatcagaagcaatatccatccatgccttaagtgtataagtgtgagctacttcaaatttgtgggcttaaatagatccgcccggactcaaggtgaaacctaaatctaacattttcggtgtcacagattcgccacgaatacgcgccagcaggcgttcagcgccaatactgcccatccgctcacgcggcgtcagcacgctcgcaagtcgtggctccatcacctgaccaatgtcatgaccgtggaaaccggcaatcgccatatcgtcaggaacttttaaccccagacgctgacattcaaacgccgcgccgaccgccaggtcatcattcgtacagaacacgccatccagctgcggatattcccgccgcgcctggcgaatcagttcaataccggaagagtaagaagaagattgctcaaccatcacgctatatggcaccaggcctgcatccagcatcgcctgttcgtatcccttctgtttgatgatagtacgttcgtcgagacgtgcgccgagataggcaatgtggcgatgcccgcgagcaataatggcagtggtcatctggcgtgctgcttcaaagttatcaaaaccgacggcgatatcaaggcatgggctcttgctgtccatcagttccaccacgggaatacccgccacttcaatcatctttaaggtgcgcggcgtgtgggtacgttcggtgaggatcaggccgtcgatattccaggagagcatggattcgaggcgttcttgctccatttccggtttataaccgtagtgcgccagcatggtctgataaccgtgcgcgtcggtgacgctttcgattccgcgtaatacttccgcgaaaacctggttggtgagagaaggtaacaggacgccaatcgcccggctggtggcgttagagaggatatcgggcgcacgattgggaatatagcccagttcatcaagagccgcggcaatcttgccgcgtagagcgacggaaacctgctccgggttgcgtaaaaaacggctgaccgtcattttggtcacgcctacacggtcagccacatcctgaagtacgggtcttttctttttcatcgtcctgaaggtacaaaagagatagattctcttagtttaacacggacacatcagaaccttcccggggaaaacagtgcttgtttacaattattagatatacactaaatcaattgcatcgcattgtgctaacgacgcggcaaaaccccggaagcgtacatcagcacgcgaccggagcgagcgaggaagcctgcaaaaaggcaggcttcaaagatgccgttgagttttaaaccggcggcagatcgaacagtaacacttcgctgtcgctatccgcatggatggagattgcctgctcatcccagattgccagaccatcgctggtgctggctttcacgccgttaatggtgacattgcctttcaccacctggatccagacgcggcgttcagcggcaatctgatgcacgctctgctcatctttcagcaacgcccagcggtacagttccatatcctgatgcactttcaaactaccatctcgcgcatccgggctgagcaccagctgtttgccctgtacggcatcgaagcgacgctgttcataacgcggcgtaataccgttttcttcaggcatgatccagatctgatacagatgcagacgctcggtgctgcttgggttgtactcactgtgacgaatacccgtaccagcactcataatctggaactcacccgccggaacctgctctttattgcccatgctgtcctgatgctcaacagtaccttccagcacgtaggtcaaaatttccatatctttatgcgggtgagtgccgaagccctgccctgcttcaatcacgtcgtcgttaatcacgcgcagcgcggagaagcccataaagttcggatcgtaatagttggcaaaagagaaagtatgccaggagtccagccagccatgatttgcatgaccacgttcatttgctttgcgtaagtagatcatttgtattcgccccctgaatgatttcgatgggcttagtgtggacccgatctgcctgggatgatagagggtgaaaattgacccctctgttcaaaaaaattgaactattcgaggggccatcaaacttacttagcgagagttactgtggagggagaggcttgctcaaatccgcgttcaaggatttccagattggtaagaacttcagattccttgacgtaatttggcgcaccgtgggtgatggtttgatacaacgcatcataaacgcgcccgtaatcgcccatctccggcttcatctcttctctgaccgtcacgccctcgtcattgacatactccagcacaccgacgctatcatccgctgcgaatcccggttcgcccggcataatattagccttcaggctggtttcctgctggtcgataccgtatttaataaagctacctttcttaccgtgaacgataaatttcggataatcgattttcaccagatggctggttttgacgatggctttcaggtcgccataaaacagttgcgcttcaaaggtgtcgtcaggattggctttattacgcaggctgcggatgtcataagcgacgtgatccgggcgaccgaacagagaaataatctggtccatcgtatgcacaccaaggccataaaacgcgccatcctgcggcagcccaggtttggtttctgccaccgggcggtaatagtcaaaatggctttccacttcaacaatctctcccaacttgccactttcaatcgcttttttcgctgtcaggaagcaggagtcaaagcgacgattctgatacggcgtgacggtcagccctttgcttttcgccaacgcaaacagctctttcgcctgcgcaagtgtcggagtgaacggtttttcgaccagcacatttttcccggcttccagcgcgcgtttcgcgtactcgaaatggctgtccgcgtgggtgcagacaacaaccagcttaacatcgggatcgtttagtacttcgtcgagatcgctggtgaaatggatatgggaataaatgggagcctgttcttccggcttcgcatggcgacgaaaaatatgcgcgacatgccagctatccttgcggttaagtacatacggcagatggtaacgggtggtgcttttgccgaagccaataaaggcgcagttgatgaccatgatttcgtcctttttaaggtggttatttacaccttagcgcaaagcggacgtggttcctactggagtgcgcataacgaacacaagcactcccgtggataaattgagaacgaaagatcaaaaaaaaagccagcacccggctggctaagtaatactggaagcaatgtgagcaatgtcgtgctttcaggttctccgcgagggtcttcctgatcgcgagacaataataatcattctcattcgcacttgtccaacactttttgcaaaaaaatgcatttgactcgcatttgaaagtcaatgatgttgaaagggacatttaccccaaagaggacaaaggaacaaatgctcttcccacgaagagggccgctaaccttagtaccccgccgttaaatcatccacgctgcgcgggtcggatgcgccgtacaactcaccgtccggcccaaccataatgctttgtgtactgcccatcgcctctttcagcgccactttctgaccttttgcttccagcagcttgagcgtatccgggctaaaccctttttcgacacgcagctcgtccggcaaccactgatggtggaaacgcggcgcattggtcgcttcggcgacgttcaagccataatcgatgctattcaccaccatttgcagcactgtagtgatgatccggctaccgcctgggctaccggtaaccagccaggttttaccgtctttcaccacaatggtcgggctcatgctgctcagcgggcgtttgttcggcccgacggcgttggcatcaccgcccaccagcccgtaaacgttcggtacgcccggtttggcggagaaatcatccatctggttattaagcagaataccgctctcgcccgcgacaatgcccgtaccgaaggtggtgttcagcgtataggtcaccgccaccgcgttaccatctttatccaccacactgtaatgggtagtttgattactctcataaggcgcaagcttgccggggcgaatttcgctggatggcttcgctttattgatatcaatttgatcggcaatagatttggcataggctttattggtcagcgcctgccacggtactttgacaaaatccgggtcgccaagatattcgctgcggtcggcgtaggcgtatttctccgcttctgccatgatttgcatcgcatcggcgctgccaaagccgtatttcttcatatcgaagttttccagaatattgaggatttgtacgatatggatcccgccggaggatggcggtggcatggagtaaacctgatacccgcgataatcgccgcttatcggagtgcgttcgaccgctttataggctgctaaatcttctttagtgatcaagccaccgtttttctgcatctcctgggcgatctgttccgcaatcgtgcctttatagaattcgtccgggccgttttcagcaatcatctccaggctctttgccaggttcgcctgcaccagcgtgtcgccctttttcagcggctcgccctctttccagaagatagctttactgttttcgtgattcggcaacacttcgctaccgtaggttttgagatcgtcagccagcgcgtcgttaacgataaaaccatcgcgtgccagtttaaacgcgggctgcacgactttgttcagcggcatggtgccgtatttatccagcgccaggctgaaacctgctaccgtacccggtgtgccggaagccagatggctagtgagactttttttgctgtccgggttgccctgatcatcgaggaacatatcgcgggtcgctttggcgggtgccatttcgcggaaatcgatagccgtggtattgccatttttgctgcggattaacataaaaccaccaccgcccagattccctgcctgcggatgcgttaccgccagcgcgtagcccaccgccacggcggcatcaacggcattcccgccctccttgagaatatccacccccacctgagtggcagtggcgtccacagacgctaccattccctgtttcgcgcgtaccgggtggaagacatcttcctccacaccatagctgacgggcggcgcaggaggcgcggcggcggcgctaaaacaacttccactgagcagagcagcaatggccacccggcgtaaaaacgtcggttttatcatcgttattctccagagattaaggggcaaccccagctaagcctggtatataactctgaattaatcatcgttttgtcgggaagcgagtaaacttaaaggatatcttcagaggaggatacgcgatgaaacgacttctgattcttacggcactcctgccgtttgtcggctttgcacagcccattaatactctgaacaaccctaaccagccggggtatcagatacccagccagcagcggatgcaaacccagatgcagactcagcaaatccagcaaaaagggatgctgaatcagcaactgaaaacgcaaactcagttgcaacagcagcatttagaaaaccagataaacaataattctcagcgggtgttgcagagtcagccgggggagcgaaatcccgcccggcagcaaatgctgcccaacaccaacggcgggatgttaaacagcaaccgtaatccggatagtagcttgaatcagcagcatatgctgccggagaggagaaacggcgacatgctgaatcagcccagcacgccgcagcctgacattccgttgaaaactattgggccgtaattattgggccgtaaagttcggaccaatcacgtcaatcgcatcggtacagatgcaatccacaccccagcgcagcaactctgctgcgcgctggggtttattgacggtataaaccagaatccgcagtccggcgtctttcaactgcatcactcgcgctttattgagtaacttatgattgagatgaatagagacgcagcccagccgcgcggtcagttcgcgccagtcgtcgcgccactcatccagcaacaaaccgcgcggcagttccggtgccgcctgttgtgcagcttctaaagcatcaatctcaaagctactcagcagcggcggcgtcataccggcccacagctcgcgtgccgccagcgccaccattttgcccgttaatggcccggtgccggtggtgggtttgatttcgatattcgccatcatcccgtgttcgcggcaacgttccgccacctggctaagcaacggtagcggctcacctttaaacattttgctgtaccaactgcccgcatccacgcgcagtaaatcctgccagttcagttcacccgcgacgccccagccgttgctggtacgttcgagattgtcgtcatggagcaggaagatctcgccatctttgcttaacttcgcgtcaaattcgatcatcttatgaccgtattttgccccgacgtcgatactcgccagggtgttttccggggccagcttaccgccgccacgatgagcgacgatgcggggataaggccagttactcatactcgttgtcctgtttcaccatcaaaaagatgcagctgattttccgccagatgcagccacagcgtgctgcctgccgtcgggcgctcctgatgcgccagtcgcaccaccagcttctgctcgccccagcgtccgtgcgccaggttatctgcgccgaggatctccagcgtgtccatcaccatcggtacgccgccttctgcctggctgcttagcgcaatatgttccgggcgaatgccgagagtcattttacgcccggcatactgacggtagccaccgtttagcggcagctcaataccgccgtccagttcgaaatgcgtgccttcgttattcacgcggcctgtcagcaggttcatcgccggactgccgataaaactcgctacaaacaggctggcgggcttttcgtagacttcaactggtgtgccaatctgttcggcaacaccgccgttcatcaccattactcgctgggcgagcgtcatcgcttcaacctgatcgtgagtaacgtagagactagtcgttttcaggcgacggtgcaactgttgcagttcaagacgcatctgcacgcgcagcttggcatcgaggttagagagcggctcatcaaacaggaacaccgccggatcgcgcacaatcgcgcggcccatcgccacacgctggcgctgaccgccggaaagctcgcgcgggcgacgtttgagcagaccgtccagctccagaatgcgcgccgcttctttaacgcgctcggcaatttgctgcttgcccatgccgcgaattttcagcccccacgccatgttttcttcgacactcatatgcggataaagcgcgtagttctggaacaccatcgcaatcccgcgatcttttggctccatttcagtcacgcgctggtcgttgatccagatatcgccttctgtcacccgctccagcccggcaaccatgcgcagcagcgtgcttttcccgcagccagacggcccgaccatcacgataaattcgccatccgccacatcaagggtcagcggtttaatgacctgggttttaccatcccagcttttggttactgcctgtaatttcagtcctgccatcttatttctcactatcgaccaggccgcgcacgaaggcacgctgcatcactaaaacaatcaccaccggagggataagcgttaacaacatcgccaccatcacactgttccattccgtggtgccttcgcctgtagcgatcatccctttgatccctgccacggtggtgccgagatccacatcggtaataatcaacaacggccacaaatactgattccagccgtagataaaggtgatcacaaacagcgccgccagattagttttggagagcggaaaaacgatgtcgcaaaagaagcgcattgggcttgcgccgtcgatccgcgcggcttccaccagctcatccggcagcgtcataaagaactggcggaacaggaaagtagcggtcgcgctggccatcagcggcagcgttaaaccggcgtagctgtcgagcatctgcaggttggcgatgacttccaccgtcgggaagatacgtacttcaaccggcagcatcagggtgataaaaatcatccagaagaagaggttacgtagcggaaaacgaaaccagacaatggcaaatgcgctgagcatgctgacggtaattttgccgagcgtaatgctgaacgccatcacaaagctgttaagcaacatccgccagaacggcgcgctattcgtgcctaccccgttcacccagatgttgtggatgttttccagcagatgtgtgccggggatgagcgtcatcggcgcggcatagacggcctgtttatccagcgtcgccgcgacaaacgccacgtacagcgggaagaggatcaccgcgatcccgaggatcagcatggtatggctgaatatcgtcagccacggacggttctcaatcattggtaacgcaccttgctttcaacatagcggaactgcaccaccgtcagcacgatgacgaggaacatcaacaccacgctctgtgcggcagagctagccagatccagtccggtaaaaccttcgcggtagatcttataaatcagcgtcgtggtggcctgaaccggcccgccggacgtggcggcgtcgatcaccgggaaggtgtcgaagaaggcatacaccaggttcactaccagcaggaagaaactcaccggggcgataagcggcagcgcaatcttaaagaagcggcgaatcggccctgcaccgtcgatggctgcggcttcgatcaagctacggggaatggattgcagcgcggcatagaagaacaggaagttgtagctgatttgcttccatacactggcaaacaccaccagaaacattgcctgaccgctgttttgcgcgtggttccagtcgtagccgaactccgcgagaaaatgggtgatcagcccgcgaccggggttaaacaggaagatccacaatacggcggcaacggcgggagccacggcgtaaggcagcaacattaaggtttgatagaaacggctgccgcgcacgatgtactccaccagcgccgcaaagaacaggcttaccagcaaaccgctgacggtgacaaaggtgctgaattttatcgtcgtccagaaggagtcgagatagtagctgtcatggaacagcgtgacgaagttatccaggccgacaaactggctggagaaaccaaacggatcgacgctttgtaggctgtaccacaacgcttcgcccgcaggccagataaaaaagataacggtgatgatgagctgcggcgcgaccagcagataaggcagccagcggctgcggaacaccggacgggaactactcattacggttgattcctgaactgtgccggatgcgcttcgcttatccggcctacacgcgatgccaggtcagataagcgaaacgcatccgacattacactgattaagacttcgtgcttttctcaaagcggcgcagcaactgatttccacgctcaacggcggtatccagtgcctgctgtggtgtcttcttaccggtccacacgctctccagctcttcatccacaatcacgcggatctgcggcatgttgcccagacgcagccctttggtgaacggcaacggcggcttattcagcatctgacgcgtcgcggtatccgcccctgggtttttctcataaaagccctgctcacgggtcaggtcatacgctgctttggtgattggcagataaccggttttctgatgccactcggcagcgttttctggcttcgcgaggaaatcgaggaacttcgccacaccggtatacgtttctttatctttaccctgcatcacccacaggctggctccgccgataatggcgttttgtggcgcatctttcgcatcggcgtcgtaaggcatcatgcctacgccgtagttaaatttggcgtactcgcgaatgttggcaagagaaccggaagaggcggtggtcatcgcgcaatcaccgttatagaacttctcggtggattcatccttacgaccgacgtagctgaagtcgcccttcttgttcatctcctcgagcatggcgatgtgtttcacctgctccggcttattgaactccagcaccgcgtccgtgccgtcaaagccgttgtttttgctggcaaacggcagaccgttccaggcgctaaagttttccagttggatccagccctgccagccgctggcgtagccgcacttcatgccggaggctttcagtttcgcggcatagtccgccagatcctgccaggttttcggcggctgttccgggtctaatcctgctttcttgaaggcgtctttgttgtaatagagaacgggggtgctgctgttgaatggctgggagagtaagtggcccgttttgctgtcggagtagtaaccactaaccgtcggcacaaactggctctcatcgaactgaatccctgcctctttaaacacgtcatacaccggtttaatggctttgctcgccatcatggtggcggtgccaacttcataaacctgcaaaatagccggcgcgttgccggtacgaaatgcggcaatccccgcgcttaaattctgttcgtagttgcctttataggtcggtacaattttgtaatccgggttttcggcgttaaaacgttgggccagagaatccacctctttacccagttccccttccatagaatgccagaacggaatggtcgtcactgcctgtgcattccccattaacgccagtccgagcgccagtgcactagctgtataatgtaacggtttcatcgtttatctctcttgttgtaccgaatgcgcgaattcacgcgttttatgctcgcggggtaacatgacatgctcgaattacagaaaaataacttttttgttacatttgtaagatagtaaggtgtcagaaagatgacaaggcggtgacggcgtgggtgagggaaaatgggagatggggcacggataagcgggaaaatatagaaggtctgaatcaaactctacagattgctcatcgtttcatgccggatgcggcgtaaacgccttatcaggcctacaagatcgtgcaaattcaacatattgccactcacccagtaggcctgataagcgcagcgcatcaggcaattttacatttgtcacctgtctcaaaggagtcttttgactccctatcaatcaacgtgttattacccgcctaaatacgcacttctcaccgcttcattcgccagcagcgcatcaccagtatcggaaagcactacatggccgttttccagcacgtagccgcgatccgccagctttagcgcctggttggcgttctgctcgacgagaaagatagtcatcccctgctcgcgcagctgctcgatggtgtcgaaaatttgctggatgataatcggcgcaagaccgaggcttggctcatcaagcagtagcaaacgcgggttgctcatcagcgcacgaccaatcgccagcatctgctgttcaccgccggacatggtgcccgcccgctgaatacggcgctcatgcagacgtggaaacagctcatacacccactttatgcgctcctggaactggtcgcgttcagcaaaaaaaccgcccatcgccaggttctcttccaccgtcatccggctgaagacgcgacgcccttccgggacaatcgccaccgcttcgcgcatgattttcgctgtctgccagtcggtaatgtctttatcatcaaacacaattcgcccgctggtggcacgcggatcgccgcataacgtgccgagcaaggtggttttccccgccccgttcgcgccaatcagcgtgacaatctcgccctgattgatatgcaggctcacctcatgcagcgcctggattttgccgtagtgggcgctgactttgtcaaaggacaacatgactttttccatcttatgcctcacctaaataggcacggatcacgtccgggttattacggatctgctccggcgtaccgtttgccagcggcgtcccctgattgaccacgtaaattcggtcgctaattcccatcaccagcttcatatcgtgttcaatcaacaagatagtggtgttgtgatgattgcgcagttcggcaatcagctcatccagctctttcgtctctttcgggttaagacctgccgcaggttcgtcgagcattaaaatctccggctgcgtcaccatgcagcgggcaatctcaagacggcgctggtcaccataggccaggttactcgcctgacggttggcgtgttccagcaaaccaatgcgctcaagccaggtcgcggcgcggtcgagcgcttcgctctgggcgcgacggaaggatggcgttttcaacaggccagagaacagcccggttttcagttgctgatgctgcgccaccagcaggttttcaattaccgtcatttcacggaacagacgcacatgctggaaggtgcgcaccacgcccatgcgggcaatttgctgccccggtaaaccttccaggtgctgatcgcgcagtaaaatggtgccgccggtgggtttgtagaatccggtcagacagttaaaaaccgtggtttttccggcaccgttagggccgattaagctgacgatctcctgcgggtacagttcaagattgacgttgttcaccgccagcaggccgccgaagcgcatcatcaggccgttaacagataataatggctgactcatgcctgctctcctttcgctgcgccgtttttcagcttcagttgcgggcgcgtcatgggcagcaagccctgcggacgccagatcatcatcagcaccatcaaaccaccgagcattaacatgctgtattcgttgaaatcacgcatcaactcgcggctcaccaccagcaaaattgccgccagaatcaccgcaaattggctgcccataccgccgagcaccactatcgccagcacaaacgcgctttcggcaaaggtgaaggattccgggctgacaaagccctgacgcgccgcaaacagcgttccggcaaaaccggcaaacgcggcacttatggtaaaggcagtcagcttgatacgacgcgggcttaagcccaggctacggcaggcgatttcatcttcacgcaacgcttcccacgcacgccccagcggcatccgcagcaggcggttaatgacaaacaggcttagcaccaccagcagcaacgccaccaggtagaggaagatgacacgatcggagggatcgtatttcaggccaaagaaattactgaacgtgtcccagccgccttcacgagcggtacggctgaactcgagtccgaagagtgtcggtttcgggatctgactgattccgttcgggccgccggtaatttcggtgttattgagcagcaatatgcgcacaatttcgccgaaaccgagggtaacgatcgccagatagtcaccgcgcaaacgcagcaccggaaaaccgagcaggaagcccgccgccgctgccattaatccagcaatcggcaggcaggtccagaagcccaagccgtaatagtgattgagcagcgcaaaagtgtaagcgccgatggcgtaaaaaccgccgtaccccagcaccagcagaccagaaagaccaacaaccacgttcagcccgagaccgaggataatgtagatcatggtcagggtggcaatatccaccgtcccgcgactaaccataaacggccacgccaccgcaagcaccaacagcgccacgaggaacagtttctgcttcaccgtggagccatcaatggcgggcagaataaacttcggtccggaaacgcttttcaaccctttctggaaagccggtcgcaaaagctggaagaaaaagaccaccgccgtgccgataaacacccactgccaacggacatcgctagccgtgtcgaccaccagtttggtgccatccagctccagttgcacgcccataaagacgcccgccagcacaaagaacatcgcggcagagagcagcgccattgcaatatgcatcggtttcatactttctctacctccgggcgacccagaataccggtcggcatcaccagcagcaccagaatcagcagggcgaaactgaccacatctttatattccgtactcagataggcagaagagagcgcctccgcaatccccagaatcaggccgccaatcatcgctcccggaatgctgccaatcccaccgagcaccgccgcggtaaaggctttcatcccggccataaagccgatgtaggggttaatgacgccgtagaactgaccgagcagcacacccgccaccgccgccatcgccgcgccaatcacaaaggtcagcgcaatcacccggtcggtgttaatgccaagcagactcgccattttcagatcttccgcgcaggcacgacacgcgcgacccatgcgggaatagcgaatgaaaatcgtcagcgccagcatggcgaggaaggtaacaatccagatcaccgcctgcatggtggtaatagaggcagagaagttttcgctatgccccaccacccactgaccgttaaacaggctcggcagcgccacgtcgcggctaccttcggtcaggctgacgtagttttgcaggaagatggacataccgattgcagagatgagtgcaatcaggcgcttagagttacgcaccgggcggtaagccacccgttcgatactccagccgtaggcgctggcaatgacgattgcgccgacgaatcccgcagctaccagcagccagccggtatcaatgcccatcatcatcagcgcggcgatgatcataaaactgacgtagctgccaatcatataaacctcgccgtgggcgaagttgatcatgccgataatgccgtaaaccatggtgtagccgatggctatcagcgcgtaggtactgcccagcgtgacgccgttaaacatctgctgcaagaaatacaaaaactgctcagacataaggtaacctttctaaacccgcccgcattttacgggcggtgggatgatcacttggctgccgtggaactaccgtcggcgtgccactggaagacaccaaaatcaaatcccttaagatcgcctttttcatcccagttcagcggcccaatcacggtgtttgcaccgttagcttttaaatctttcaccagcgccagcggctcatcgctgccggtacgctcaagggcagtcgccagagattgcaccgccgcgtaggtgatccagacataaggcccggacggatctttcttgtctgctttcagcgcatcaacgatgccctggtttgccggatcctggtcatagcgttttggcatagtgaccaacatgccttcggcggcatcaccggcaatgttgctcaagctcgcattacccacaccttccggccccataaactgggttttcaggccaacggaacgggcctggcgcagcatctgccccatttccgggtagtaaccgccgtagtaaacgaagtcgatgttttcttttttcaggcgggcgatcagcgcggagaaatctttctccccggcggtaataccgtcgaagaagacgacgttggcgttagccgctttcagcccgtcctgcacgctacgcgccagcccttcgccatactgttgtttgtcgtgaatgatggcgatgcgctggggcttcaccgtctcaagaatgtattttgccgccgttggcccctgggaagagtccagcccggcagtacgcataatgtgttgataaccgcgttgggtcagctccgggttggtcgctcccgggctgatcatcagaataccttcgtcttcatagatatcactcgcaggctgggtagaagaagaacacagatgaccaataacgtatttaatgccgtcattaacgattttgttggcgaccgcaacggcttgtttcgggtcgcatgcgtcgtcatattccacgccaaccagtttatcgcccttaattccccctttggcattaatgtctttaattgcctgacgcgcgccgttaaattccatatcgccccactgggcaatcgggccggacatcgcgccgacaacggcgactttaatatcgtcagccatagcggtgtgactaattgccagtgcaatcatccctgcgatgatagttttcgcattccgtttcatagtcaaaaatccccattcgtgatgttgtgttgctttgtttttatgtgttaacaaatcagactgttctttttttatactgcactgtttttgcctgtctgattaaggggttagcgcagtattttgtgataatagcgattaaaatccctatttttcagtcgattaagaacagataatattctgaatttattgatagataaacagaaaaaagtgcctttgtcagcataaaataacggcacaaagggcggaataattcactatcattcaggggattatgctggacatttttcattctctaatgttttaattttgtaattattgctgttaaaaaattaatcacctgccaaaagaaataaaaaagagaaagcctccgattaaattatttcgctacactggttccacttttgtgatttacacgggttacccatgaagctgaccatcattcgattagaaaaatttagcgaccaagaccggattgacctgcaaaagatctggccggagtattccccttccagcttacaggttgacgataaccaccgtatctacgccgcgcgttttaacgagcgcctgctcgctgccgtgcgggtaaccttaagcggcaccgagggagcactggattccctgcgcgtgcgggaagtcacccgccgtcgcggtgtggggcaatatctgctggaagaggttttgcgtaacaatcctggcgttagttgctggtggatggcggatgcaggcgtggaagatcgcggtgtgatgacggcgtttatgcaggcgctggggtttacggcacaacagggcggctgggagaagtgttaatcgtcaagtttgatttcaaaagtgatattgcctgatgcgctacgcttatcaggcctacaatgtgtgttgcaatttactgatttctttggatcttgtaggccggataaggcgtttacgccgcatccggcatgaagcaacgtactcgatattagcaatttggcggcaacccaaagttgccgattaatgattacttcgcatcggtcgccgtgccgttggcgtgccagtcaaatacgccgaactcaaagcctttcagatcgcctttctcatcccaggtcagcggtcccattacggtatccacggagttcgctttcaggtatttggcgatttcagccggatcgtcagactgattcaggcccgcctgcaaagattgcagcgcggcgtaggtggtccaaacgaatgcgccacttgggtcctgttttttcgctttgatcgcgtcaacaatgggtttgttcgccggaacctgatcgtagttcttcggcttggtcaccagcagcccttccgcactttcgcccgcaatgttagacaggctaacgttagccacaccttccggccccataaactgagttttcagccctgccgcgcgtgcctgacgcaggatttgccccatttccgggtgataaccgccgtagtaaacgaagtcgatattctcttttttcagacgcgccaccagcgtactgaaatctttttccccggcggtgatgccatcaaagaacaccacgtttgcattgcctttcttcaggccgtcctgcaccgctcgcgccagaccttcgccgtattgctgtttgtcgtgaacgatagcaatacgctgcggtttcactttctcaagaatatatttcgccgccgtcggcccctggtcggagtccaggccggtggtgcgcaggatcagctgatagccacgggcggtcagctccggcgcggttgccgctggggtgatcattaaaatgccttcgtcttcgtagatgtcagacgcaggctgcgtactactagaacagaggtgaccaatcacatatttaatgccgtcgttaacgactttgttcgccaccgcaaccgcctgtttcgggtcacaggcatcgtcatattttacgatttgcagtttgttgcctttaatgccgcctttagcgttgatatccgcaaccgcctgctctgcgccggtaaactcctggtcaccgtactgcgcaaccggaccggacattgcgcccacgaccgcgactttaatatcttctgccagagccatattgctgaatgccagcgcgatacatcctgccagtaacgctttaccctttatgttcatcctgagaatccccattcttctggttattacgtgtgttgtgatgttgtttttcagcactttatttcgttttatgcatgactacccgtgctttagcagcatactctgctaaaacatacccgatttttatgatattggaatagctattttgacagtttattaacaatctgcgtggggattggcgttttgccggaggggaaattgattattacagaggcccaaaaaacaaaaaccccggactctcatccagggttctctgcttaatagcggaaattacgcttcaatggcagcacgcaattttttcatcgcgttcttttccagctggcgtacacgctcagcggaaacgccgtaacggtcagccagttcctgcaacgtggacttgttgtcttcgtccagccagcgcgcacggatgatgtcctggctgcgttcgtccagaccctgcatcgcgtcggtcagacggtttgccgcctgctcttcccagttatcatcttcaatgccgtcggcaaagttagaacttttatcctgcagatagagcaccggagccatcggctggctgtcggaatcgtcgtcggaagacaggtcaaaggtcatgtcctgtgccgccatacgactttccatctcacgtacgtctttgctggttacgcccagttcacgggccaccatttcgacttcatcctggttaaaccagcccagacgctgcttggttttacgcaggttgaagaacagtttgcgctgcgctttggtggtcgcaactttgacgatacgccagttacgcagaacgtattcgtggatctctgctttgatccagtgaacggcgaaggagaccaggcgcacacccacttccgggttgaaacggcgcactgctttcatcaggccgatgttaccttcctgaatcaaatccgcctgtggcaggccatagcccgcataattacgagcaatatgaacaacaaaccgcaggtgagacaggatcagcgttttagctgcttccagatcgccatggtaatgcagcttttcagccagcgcccgctcctcgtcagcgctcaacatcggccacgcgttagctgcccggatgtaggaatccaggttgccaactggggctaaagctaaactttgcattttgtcagtcattcaaatcctctcaatcgatatcttctggcgcttcagtggtagcaacaactgtgccagagcttaagagcaacgaggttatcattcactgttttatcagaccgtgattttatccacaagttcaatgcaagcttgtgaataaattacgcacaaaatgtgacatagagatgaaataccgggaagagacaacggggtctctttccctgctacggaacccattgcagggaaagagtataacacgcttttattattcaggcgtaaagtggcgtaaatgttgtaccgtggcaagccacgctgccacccagccaatcatgctgcataccagcagcaatagcaggcattcatcgaaacttaagccattgatatcaaacttcgttccgaaaacctgtgccacttccgcaaccgcgctactcaatcgcagcaccagaatttcactcaaaattaaactcaacaatgcgccagaaaatcccagcagtgcgccaccatacaggaacgggcgcaggatgaatccatctgtcgcaccaatcagtttctgtacgttaatggagtcacggcgagcaaagatactcagacgcacactgttaccgatgacgaggaacacggccgccaccatcaacacgccgatcatcgcgctaacgcgcccgaccagcccggtcaacgccgccagacgggcaaaccagctgtcatccatccgcacttcgtcaatgccgttaatctgcgtgatacgatcacgcagcgtattcagactttccgtcccctggaaatcgagtttcgggatcaccaccgccactgccggaagcgggttttcttccagcatatccagcgcaccaccaaaaccagaccagttacggaactcacccagtgcgtcttcacgagaaagatagttcactttctccacgccttgctcggcctgcaactgtgccaccacgcccgcagcagcgtcatcgtccagcgttttttgcagataaacagtgatttgcggactcggataatactgcgtcgccgcctggttaacgtttttgtacaccatataacagacgctgggcagcgtcagagaaatggcgataaccatcaccgttaaaaacgtggcgaacggtttgcttttcagatcctgcaatgcgccgtggaaggcatagcgcacctgttcgttgaaaacgttggttttgcgatttaccggttttgggctggatttcgcgcgttttggtgcgttacgaccgccgtcgccactgccgccgacgcttttacggaagcgatcaagacgcccgccaaactgccgaatatgattgattgcatcgcgcttattcatggcccacgcctccatgcaagtgaccatcgctcagggtgagcatgcgataggaacgccggctgatcaggttgatgtcgtgcgttgccatcaatacggttaccccaacgcggttaaactcttcaaacagacgtaaaatgccttcgctcagcgcgtcgtccaggttaccagtcggttcgtccgccagcagtaccgcgggcttgttcaccaccgcgcgggcaatgccaacacgctgttgttcaccgccgctaagctgaatagggaagttcttcgctttgtccagtagcccgactttatccagcgccgcgctcacccggcgacgaatatcgtcaccgctggcaccggcgataatcagcgggatcgccacgttatcgtagacagtacggtccatcagtagatggtgatcctggaaaatcatgccaatctggcggcgcagaaacggaacttcacggtttttcagacgcgtgatgtcatggccgctaaaccagattttcccggcgctgggccgctcaatcccacagatcagcttcaggagggtacttttccctgcgccggaatgaccggtcagaaacgccatctcacccggctgcatatggaacgtaacgccctgcagcgcctgtctcccaccgagataagccttgctgacatgttcaaagcgaatcattgttaatcctctcgggcaaaaagtgcctctataaagtcgtccgccttaaacggacgcaaatcctcaatacgttcgccgacaccaatgtagcggatagggataccaaactggtcagccacgctgaaaattaccccgcctttcgccgtgccgtccagtttcgttagcgtgatgccggttaagccaacggcttcatggaacagtttggcctggcttaccgcgttctgcccggtgctggcatcaatagtcagcataacttcatgcggcgcttcaacgtcgagtttcttcatcacgcggacgattttcttcaactcttccatcaggtggcttttgttctgcaggcgtccggctgtatcggcaatcaggacgtcgatattacgcgctttagctgcctgaatggcgtcgaagataacagaggcggaatccgccccggtatgctgggcaatcaccggaatattgttgcgctgaccccagacctgaagctgttcaaccgcagctgcacggaaagtatcacccgccgccagcatcacgcttttaccctgctgctcaaactgacgcgccagcttaccaatcgtcgtggttttacccacaccgttgacgcccaccatcaggatcacaaacggcgctttgccttcaacattcagcggctcatcgactttcgccagaatctcgcccatctcttctttcagcaggccatagagcgcctcggcgtcacgaagctgcttgcgggatgcgccttccgtcagattggtgataattttacgtgtggtttccacacccacatcggcgatcaaaagctgctcttccagctcctcaaacagatcatcgtcgatttttttaccgcggaacaggctgataaatccggaaccgagattttctttggtttttaacaggctgcgtttcaggcgcgcgaaaaaaccttctttggtcggtttttcctgctcctgagcgatttcttccaccggctgctcttcttctgccggaggaaccaccatcaccgcctcttctgccgcttcggcagccagcgccgtttccagctcttcgtcggtaatttcttctttagccgcttcttcttccgccgcttcgacaatctctacggtttccgcttcagcctgccactcttctgggctaaccgcttcggcgttgacgtcttccggcaacggcagctcttcacgttcgatagccactggctccggcgtttcttctacgaccggttccggctgtgcaacgacttccgcttcaggctgcgctttttcactttcagcaacctgttcagtgacttccacaacgtcggcagcaaaagtttccgcctcggcttcagtatgcgcttgcggctgctcttcaacggcttgttcagaggccttcacaggctcttgcgcctgaacgatttcttctacaaccggttgttcattctgaacttctgtctctttttccggggtctgctctttttgaccaaagcccagccaggaaaaaaagccacgttttttttctttcgccatttgcgactacactcctcgctgttgcttcatggcacagcgttaacgctatgtacatagcagctaaaaaaatgatgaaatagtctatcacttaacttaattcacatcaccgcctgcaagtatgtgttatctggcggattgagcaatttatcatgaaaaaaccgaatcattccggcagcggccaaatccgcattattggcgggcagtggcgaggccgtaaactcccggttcctgatagcccaggtctgcgccccaccaccgaccgcgtacgcgaaacgttgtttaactggctggctccggtcattgttgacgcccaatgtctggattgcttcgccgggagcggcgcgctggggctggaagcgttaagccgctacgctgcgggggcaacgttgattgagatggatcgcgcggtttctcagcagttaattaagaatctggcgacactaaaagcaggcaatgcacgcgtggtgaacagcaacgcgatgagtttcctggcgcaaaaaggtacaccgcataatatcgtgtttgtcgatccaccgttccgccgtggcttgttagaagagacgataaatttactggaagataacggctggctggctgacgaagccctgatttatgtcgaaagcgaagtcgaaaacggtctgcccactgttccagcaaactggagtttacatcgggaaaaagtggcgggtcaggtggcttatcggctgtatcaacgcgaagcacaaggagaaagtgatgctgattaatattggtcgtttgttaatgctctgcgtttggggatttttaatcctcaacctggtgcatcccttcccacgcccgctgaatatcttcgttaacgtggcgctgatttttaccgtgctgatgcatggtatgcagctggcgctattgaaatccactttaccgaaagatggcccgcagatgaccaccgccgaaaaggtacggattttccttttcggcgtgtttgaactgctggcctggcagaagaaatttaaagttaaaaaataaccttattgttcgcctacaaagctgacaaagcgcgttcctttatagctcagcgtacctttatcgcccactgtcagggcgtggtactgctgggcgtcgaggcgaaacgtctgctccattcctccgctttgcggtttgaagcttgcctcatagcgtatactggtgcctgccggagtcacttcctgctggcggctacggcgatcgttaatcggtttttcccgcttgttgctcaccaccaccagcttttgctggagcggagccatatcattatcagctttttcccgtcgctgttgcataaaacgaaagcttgcggcgacgacaattaagccaatgataacaataaagaaaagaggtggtttgctcatctttatccctcatcggaaaatgcggaaataagcataccctgccagttatggtgttgtcatccgtccaccctcgccactaaactggaagcaagaccgtaggcattccgcttacgaaaaaataacgaattcaaggaactaagatgctttggagctttatcgctgtctgtctttccgcatggctatctgtggatgcaagctatcgtgggccaacctggcaacgctgggtgtttaaaccgttaacccttcttctcctgctgttactggcctggcaagcgccgatgttcgacgccattagctatctggtgctggcagggctgtgcgccagtctgctgggcgatgcgctaaccctgttgccacgtcaacgtctgatgtacgccatcggcgcgtttttcctcagccacctgctgtacaccatctatttcgccagtcagatgacgctctctttcttctggcctctaccactggtgctgctggttctgggtgcgctgttactggcgattatctggacgcgcctggaagagtaccgttggcctatctgcacgtttatcggcatgacgctggtgatggtgtggctggcaggtgaactgtggttcttccgtccgaccgctccggcgctctctgcgtttgttggcgctagcttgctgtttatcagtaactttgtctggctggggagccactatcgccgacgcttccgtgcggataacgcgattgctgcggcctgctactttgccggtcacttcctgatcgtccgcagcctgtatctctgataaaacttgactctggagtcgactccagagtgtatccttcggttaatgagaaaaaacttaaccggaggatgccatgagcactcctgacaatcacggcaagaaagcccctcaatttgctgcgttcaaaccgctaaccacggtacagaacgccaacgactgttgctgcgacggcgcatgttccagcacgccaactctctctgaaaacgtctccggcacccgctatagctggaaagtcagcggcatggactgcgccgcctgtgcgcgcaaggtagaaaatgccgtgcgccagcttgcaggcgtgaatcaggtgcaggtgttgttcgccaccgaaaaactggtggtcgatgccgacaatgacattcgtgcacaagttgaatctgcgctgcaaaaagcaggctattccctgcgcgatgaacaggccgccgaagaaccgcaagcaagtcgcctgaaagagaatctgccgctgattacgctaatcgtgatgatggcaatcagctggggtctggagcagttcaatcatccgttcgggcaactggcgtttatcgcgaccacgctggttgggctgtacccgattgctcgtcaggcattacggttgatcaaatccggcagctacttcgccattgaaaccttaatgagcgtagccgctattggtgcactgtttattggcgcaacggctgaagctgcgatggtgttgctgctgtttttgattggtgaacgactggaaggctgggccgccagccgcgcgcgtcagggcgttagcgcgttaatggcgctgaaaccagaaaccgccacgcgcctgcgtaagggtgagcgggaagaggtggcgattaacagcctgcgccctggcgatgtgattgaagtcgccgcaggtgggcgtttgcctgccgacggtaaactgctcagtccgtttgccagttttgatgaaagcgccctgaccggcgaatccattccggtggagcgcgcaacgggcgataaagtccctgctggtgccaccagcgtagaccgtctggtgacgttggaagtgctgagtgaaccgggagccagcgccattgaccggattctgaaactgatcgaagaagccgaagagcgtcgcgctcccattgagcggtttatcgaccgtttcagccgtatctatacgcccgcgattatggccgtcgctctgctggtgacgctggtgccaccgctgctgtttgccgccagctggcaggagtggatttataaagggctgacgctgctgctgattggctgcccgtgtgcgttagttatcagtacgcctgcggcgattacctccgggctggcggcggcagcgcgtcgtggggcgttgattaaaggcggagcggcgctggaacagctgggtcgtgttactcaggtggcgtttgataaaaccggtacgctgaccgtcggtaaaccgcgcgttaccgcgattcatccggcaacgggtattagtgaatctgaactgctgacactggcggcggcggtcgagcaaggcgcgacgcatccactggcgcaagccatcgtacgcgaagcacaggttgctgaactcgccattcccaccgccgaaagtcagcgggcgctggtcgggtctggcattgaagcgcaggttaacggtgagcgcgtattgatttgcgctgccgggaaacatcccgctgatgcatttactggtttaattaacgaactggaaagcgccgggcaaacggtagtgctggtagtacgtaacgatgacgtgcttggtgtcattgcgttacaggataccctgcgcgccgatgctgcaactgccatcagtgaactgaacgcgctgggcgtcaaaggggtgatcctcaccggcgataatccacgcgcagcggcggcaattgccggggagctggggctggagtttaaagcgggcctgttgccggaagataaagtcaaagcggtgaccgagctgaatcaacatgcgccgctggcgatggtcggtgacggtattaacgacgcgccagcgatgaaagctgccgccatcgggattgcaatgggtagcggcacagacgtggcgctggaaaccgccgacgcagcattaacccataaccacctgcgcggcctggtgcaaatgattgaactggcacgcgccactcacgccaatatccgccagaacatcactattgcgctggggctgaaagggatcttcctcgtcaccacgctgttagggatgaccgggttgtggctggcagtgctggcagatacgggggcgacggtgctggtgacagcgaatgcgttaagattgttgcgcaggagataaggcaaaccgatcgcaacattgagcgcgatcggtcccctcgcccctctggggagagggttagggtgaggggaaaaggcggcatcgaagccaatcagcccctatcaaccgcctttacgaatcaaataacgataaggcagtccatccgtctctttagcaaccagttcgtgttccataaaggtacaaaacccaggaatatcgcgggtagtggccggatcgtcggcgataatcagcaacgtttcgccaggctgcatattgcgcacggttttgcgcaccatcatcaccggttccgggcagcgcaggccaagcgcgtcgagtgtgtggtcagggctggaaaagagatcggtcattttcttctcatcacttaaaaaaacggcgctagtttacgccctgtgagtccgtaagcaaactaggttaacgattgcgtgaaaattaaccattgcattgtcaacgtaaagcagtatcatgcggcggctcgaaaaaagggtaagcacgttattatgttaaggtaacagacgtgtcgtacgtattgggttccctcaccccaatggttaatcaaaaaggtacaatatgaacgttttcagccaaactcaacgctataaggcgttgttctggttaagcttatttcatctgctggtgatcacctccagtaactatctggttcagcttcccgtctccattttgggtttccataccacctggggcgcgtttagctttccgtttatttttcttgctaccgacctgaccgtgcgtatttttggcgcaccgctggcccgacgcattatcttcgcggtaatgatccctgcgttattaatctcctacgtcatcagcagcctattctatatgggttcctggcagggattcggcgcactcgcccacttcaacctgtttgtcgcccgtatcgccaccgccagtttcatggcctacgcgctggggcaaatcctcgacgtgcacgtttttaaccgcctgcgtcagagtcgccgctggtggctggcaccgacagcgtccacactgttcggtaacgtcagcgacacgctggcctttttcttcattgccttctggcgtagcccggatgcctttatggctgaacactggatggaaatcgcgctggtcgattactgtttcaaagtgttaatcagtatcgttttcttcctgccaatgtatggcgtattactcaatatgctgttgaaaagactggcagataaatccgaaatcaacgctttgcaggcgagttaaaggttcgttatcagagttgtgataagatggatgaatgagccgttatggccgtttatcgaaaggaagaagtcaatgcgcaatctggttaaatatgtcggaattggcctgctggttatggggcttgcggcctgtgatgataaagacactaacgctacggcgcagggtagcgtcgcggaaagtaacgctaccgggaatcccgtcaacctgcttgatggcaagttaagtttcagcctgccagcggatatgaccgaccagagcggtaagctgggaacgcaggccaataacatgcatgtctggtccgacgccaccgggcagaaagcagtcatcgtcatcatgggcgatgatccgaaagaagatctggcggtgctggcgaagcgtctggaagatcagcaacgtagccgcgatccgcagctgcaagtggtaaccaataaagccattgagctgaaaggtcacaaaatgcagcagttagacagtattatctccgcgaaaggccagacggcgtactcttccgttattctgggtaacgtgggtaatcaactgctgaccatgcaaattacgctgcccgctgacgatcagcaaaaagcgcagaccaccgcagaaaacatcattaatacgctggttattcagtaagttttaagaactactggcggcctcagggacgtgttccggaggccgtttttttaatcgccacgtcagtaataacgcgattgcgaccagtcccgccgccgccagataaatcaccggtacgcccgcccagctcatcaccagcccagccagtggtccagtcacgccaaggcttaaatccataaatacggtgtaagttgccagcgccgccccctgattttgctgcggaaccgcttttaccgccactacacccaatgccgggaacaccaggctaaacccggcccccgccagtaagacgccgattttcgccatccacggcatagtcgccacgccaaccagtagcaggccgattatctcaacgctaaagcaaatcatcgctacgtttaagccaccgatacggttaatgccgttagggaataacaaacgcgtaccgacaaacgcacagctaaacagcgtcagcgcgaaagccgcaccgtcccaacctttagcgtcataaaacagcgtgataaaggtggcgatgacgccaaatccggcggaagccagtgccagcgccataccgtacagccagacgcgcccaagcaccgcgcgaaacggcagcggtttgcctttactggcttttaccgtcggacgcgggatcgccaacaaaatggccaccagcgccacgcccataatgattaacgctaacgcctgcaagccgccccagtgataaaacacgacgcctaacggcgcacccatcgccatcgccccgtaagtgacaatgccgttccagctaatcacccgcccgatatgcaggctgccaaccacgccaacgccccatagggtgcttcccgttccggcaaaactttgcccaatcccaaggatgacgcgccccaggcaaagtaataacaggctgatgacaggcagactggcggttaatcctgccgtcagataccccagaccgctcaaaaagcagccgcataaaccgaagacgacaatctttttgggtcccaggctatcggcgtaacgtccggcatgagggcggctcagcaaggtggcgaaatattgcaggctgataaccaatcctgcccagaaggcgctaaagcccatcacatcatggacatagcccggtaatacagcgagcggcaacccgatggtgaggtagctggcgaagttaaacatgactatagagacaatgcgcaaattcaggcgcaatccgtttagcgcgggttcggctacgggttcgggcatgaggatcaccacatttttacaacagtgtttcatttttaccacgtgctgacgtgaaaatcagcagtaagaatcagaatattgctggcgtgactcccgctacacttaatacaaaaagtcacaaggaagccccaatggaaacccctcaacccgataaaacgggcatgcacattctgctcaagctggccagcctggtagtgatcctcgcgggcattcacgcagcggcagatatcattgtgcagctgttactggcgctgttttttgccatcgtcctcaacccgctcgtcacctggtttattcgtcggggagtacaacgccccgttgccattacgattgtagtggtggtgatgctgatcgcactaaccgcgctggtcggcgtactggcggcaagctttaacgaatttatctctatgctgccgaagtttaataaggagctgacgcgcaaactttttaaattgcaggagatgttgccttttcttaatttgcatatgagcccggagcgaatgctgcagcggatggacagcgaaaaagtggttaccttcaccacagcgctaatgaccgggctttccggggcaatggcgagcgtgcttttgctggtgatgaccgtagtttttatgctgtttgaagtgcgccacgtcccttacaaaatgcgttttgcgctgaataatccacagattcacatcgcgggattacaccgcgcacttaaaggcgttagccactatcttgcattgaagacgctactcagtttatggacaggtgtcatcgtctggctggggctggagctgatgggggtgcagtttgcgctgatgtgggcagtactggcgtttttgctcaactacgtgcccaatatcggcgcggtaatttccgccgtaccgccaatgattcaggtgctgctgtttaatggtgtttacgaatgtattctggtcggcgcattgtttttagtggtccatatggtcatcggcaatattttagaaccacggatgatgggccatcgcctggggatgtccaccatggtggtatttcttagtttgttaatttggggatggctgctcggcccggtagggatgctacttagcgtgccattaaccagcgtgtgtaaaatctggatggaaaccaccaaaggcggtagcaaactggcgattttactggggccgggcagaccgaaaagtcggttaccgggatgaggcgacaagtgatacgatacgcactttcattttccattaaacgttggccctgatatgtatcggatagttctggggaaagttagcaccttaagcgcagctccactgccaccgggtttacgcgagcaagcaccgcaaggtccacgacgcgaacgctggctggcggggcgtgcattgcttagccacacgctttccccgctaccggagatcatctatggcgaacaaggcaaacctgcatttgcgccggaaatgccgctatggttcaacttaagccatagcggtgacgatatcgccctgctgttgagtgatgaaggcgaagtcggctgcgatatcgaagtgattcgcccgcgcgccaactggcgctggctggcgaacgccgtattcagcctcggggaacacgctgagatggacgccgtgcatcctgatcagcaactggaaatgttctggcgcatctggacgcgcaaagaagccatcgttaaacagcgtggcggcagcgcctggcaaatcgtcagcgtagacagcacctatcactccagcctgagtgtcagccattgtcagcttgaaaatttaagccttgcgatctgcacccctactccctttacgctcaccgccgacagtgtgcaatggatcgatagtgttaactgatccgcccacccgactgcccatctattgatccagaacaggtaatcagtatgacgaatacttaaaatcgtcatacttatttccgccatctattttaatccattggggttaccatgctctccacactccgccgcactctatttgcgctgctggcttgtgcgtcttttatcgtccatgccgctgcaccagatgaaatcaccaccgcctggccggtgaatgtcgggccactaaacccgcacctttacacgcctaaccagatgttcgcccagagcatggtttatgaaccattggtgaaatatcaggcagacggtagcgtgatcccgtggctggcaaaaagctggactcatagtgaagatggtaaaacctggaccttcaccctgcgtgatgacgtgaaattctccaacggtgaaccgttcgatgccgaggcggcggcagaaaacttccgcgcagtgctcgataaccgtcaacgtcacgcctggctggagctggcaaaccagattgttgatgttaaagcactcagtaaaacagagctgcaaattaccctgaaaagcgcctactatcctttcctgcaagaactggccctgccccgtcctttccgttttatcgctcccagccagtttaaaaaccatgaaaccatgaacggaattaaagcgccgattggcaccggaccgtggattttgcaggaaagcaaactgaatcagtacgatgtcttcgtccgtaacgaaaactactggggcgaaaagccagcgattaaaaagatcacctttaacgtcatcccggacccgactacccgcgcggtggcgtttgaaactggcgatatcgacctgctgtacggaaacgaagggttattaccgctcgataccttcgcccgctttagccagaatccggcttaccacacccaactgagtcagccgatcgaaaccgtgatgctggcgctcaataccgccaaagcccccaccaacgagctggcagtacgtgaagctcttaattacgcggtaaacaaaaaaagcctgattgataacgcgttgtatggcacccagcaggtcgccgacaccctgtttgccccttctgtgccctacgccaacctcggcctgaaaccgagccagtacgatccgcaaaaagcgaaagcgttgctggaaaaagccggttggacgctgcctgcgggcaaagacatccgcgagaaaaatggtcagccgctgcgcattgaacttagcttcatcggcaccgatgcgttaagcaaaagcatggcggaaatcattcaggctgatatgcgccagattggcgcagatgtcagcctgattggcgaagaagagagcagtatctatgctcgtcagcgcgacggtcgttttggcatgattttccaccgcacctggggcgcgccatatgatccacacgccttcctcagtagtatgcgcgtaccgagtcacgctgacttccaggcacagcaaggattagccgacaaaccgctgattgataaagagatcggcgaagtgctggcgacccatgacgaaacgcaacgtcaggcgctgtatcgcgacattctgacccgtctgcatgacgaggcggtttatctgcctatcagttacatcagtatgatggtggtaagtaaaccggagctgggtaacatcccctacgcgccgatcgccaccgaaattccgttcgaacagattaaaccggtgaaaccttaatgttgcgttacgtattacgccgctttctgctgctgatcccgatggtgctcgccgccagcgtgatcatttttctgatgctgcgcctcggtaccggcgacccggcgctcgattatttgcgtctgtctaacctgccgccgacgccggagatgctggcctctacccgcaccatgctgggactggatcagccgctgtacgtccagtacggcacctggttgtggaaggcgctgcatcttgactttggtatcagtttcgccagccaacgcccggtactggacgatatgctgaacttcctgcccgccacgctggaacttgcaggtgcggcgctggtattaattctgctcacttccgtaccgctcggtatctgggcggcgcgccatcgcgaccgtctgccggatttcgccgtacgtttcatcgcgtttcttggcgtgagcatgcctaacttctggctggcgtttttactggtgatggcgtttagcgtgtatctgcaatggctacccgcgatgggttacggcggctggcagcacatcattttgcctgcggtttccattgcctttatgagcctggcgattaacgcgcgtttactgcgcgccagtatgctggacgtcgccggtcagcgtcacgtcacctgggcgcgtctgcgcggcctgaacgacaaacagaccgaacgtcgccacatcctgcgcaatgccagcctgccgatgatcaccgccgtggggatgcatatcggcgaactgattggcgggacgatgattatcgaaaacatctttgcctggccgggcgtcgggcgctatgcggtgagcgcgatttttaaccgtgactatccggtgatccagtgctttacgctgatgatggtggtggtttttgtggtctgtaatttgattgtcgatttgctcaacgccgcgctggacccgcgcattcgtcgtcatgaaggagcgcacgcgtgaactttttcctctcttcccgctggagcgtacgcctggcgctgatcattatcgccctgctggcgctgattgcgctcaccagccagtggtggctgccgtatgacccacaggcgattgatttgccgagccgcctgcttagcccggatgcgcagcactggctgggcaccgatcacttaggtcgcgatattttcagccggctgatggcagcgacccgcgtgagcctcggtagcgtaatggcctgcctgctgctggtgctgacattagggctggttattggcggcagcgccgggttgattggcgggcgcgttgatcaggccaccatgcgcgtcgccgatatgtttatgaccttcccgaccagcattctgagcttctttatggttggcgtgctcggcaccgggctgaccaacgtaattatcgccatcgccctgagccactgggcgtggtatgcacgcatggtgcgcagcctggtgattagtctacgccaacgcgagtttgtgctggcgagtcggctttccggtgcgggccatgtgcgggtgtttgtcgatcatctggcaggcgcggtgatccctagcctgctggtgctggcaacgctggatatcggccatatgatgctgcacgtcgcggggatgtctttccttggcctcggtgtgaccgcgccgaccgccgaatggggcgtgatgattaacgacgcgcgccagtatatctggacccagccgctgcaaatgttctggccggggctggcgctgtttatcagcgtgatggcctttaacctggtgggtgacgcactgcgcgatcatctggaccctcatctggtgacggagcacgcacactaatgccgcaacagattgaactacgtaatatcgcgctacaggccgcgcagccgctggtacacggtgtaagcttaaccctgcaacgcgggcgcgtgctggcgttagtcggcggtagcggcagcgggaaaagtttaacctgcgccgcaacgctgggcattttgcccgctggcgttcgccagacggcgggggaaattttagccgatggcaaaccggttagcccttgcgccctgcgcggcatcaaaattgccaccatcatgcagaacccgcgcagcgcctttaatccactgcacaccatgcacacccacgcgcgggaaacctgcctggcgttagggaaacccgccgatgacgctacgcttaccgctgccatagaagcggtggggctggaaaacgccgcgcgcgtgctgaagctgtacccgttcgagatgagcggcggcatgttgcagcgcatgatgattgcgatggcggtgctgtgtgaaagtccgtttatcatcgccgatgaaccgaccaccgaccttgacgtggtagcacaggcgcgcatcctcgatctgctggaaagcattatgcaaaaacaagcgccgggaatgctgctggtgacccatgatatgggcgttgtggcgcgtctggcggatgacgtggcggtgatgtctgacggtaagattgtcgaacagggcgatgtagaaacgctgtttaacgcccccaaacatacagtgacgcgcagcctggtttccgctcatctcgccctctacggtatggagctggcaagttgacctaatacggtatggagctggcatcatgactttacttaacatctccggcctttcccatcactatgcgcacggtggatttaacggaaaacatcaacatcaggcggtgctgaataacgtttccctgaccctgaaaagcggcgaaaccgtcgccctgctggggcgcagcggctgcgggaaaagtaccctcgcgcggttgctggtgggtttagaaagccccgcgcaggggaatattagctggcgtggcgaaccgctggcgaaactcaatcgcgcccagcgtaaagcgttccgccgcgatattcagatggtatttcaggactccatcagcgccgtgaatccgcgcaaaaccgtgcgcgagatcctgcgtgaaccgatgcgccacctgctaagtctgaaaaaatccgaacaactggcgcgcgccagcgaaatgctgaaggcggtcgatctcgatgacagcgttctcgacaaacgcccaccgcagttaagcggcggccagctccagcgcgtctgcctggctcgcgcgctggcggtcgaaccgaaactactgattctggatgaagccgtttctaaccttgatctcgtgttacaggcgggtgtcattcgcctgctgaaaaagctacaacaacagtttggcaccgcctgcctgttcatcacccacgacttacgcctggtagaacgcttttgccagcgggtaatggttatggacaacggacaaatcgtcgaaacccaggtggtgggagagaaattaaccttttcctctgacgccggacgtgtgctacaaaacgcggtattacccgcattccccgtgcgccgtcgcaccacagaaaaggtttaacgcaaatgcaacgagtcaccatcacgcttgatgacgatttactggagacgctggacagcctgagccagcgtcgtggttataacaaccgttccgaagctatccgcgacattctgcgtagcgccctggcgcaagaggccacccagcagcacggcacgcaaggtttcgcggtgctgagctatgtgtatgaacacgaaaaacgcgacttagccagccgcattgtctccacccagcatcatcaccacgacctctccgtcgccacgctgcatgtgcacatcaaccacgacgactgtctggaaatcgccgtgttgaaaggtgacatgggtgacgtgcagcattttgccgatgacgttatcgcccagcgcggcgtgcggcacgggcatttgcagtgcttgccgaaggaagattgagttacgccattgtcccaatcgtcttcctgaatcgcagcagcgcaatggtgaaaaatgcgccgccaattgccatcagcgtcagaaactgcggccagacgatttcgaatccggcaccccggtagaggatggcctgcgcgaggctaacaaagtgtgtcgtcggcatggtcagcataatgtcctgcaccatctgcggcatactttcgcgcggcgtggaaccaccggaaagcatttgcagcggcagcagcaccagaatcaccagcagccccagttgcggcatactacgcgctatcgtccccataaaaatgccgatactcgtggtggcaaacagactgagcgccacgcccagcataaacagcgggatgctgccttcaatcggtacgcccagtacacctttcaccatcagcaccaggcttaatccgcttaccaccagcaccaccagccccatgctccagatcttcgccatcatgatctcaaacggcgttatcggcatcaccagtaagtgttccaccgtgccgtgttcacgctcgcggatcagcgcgcttccggtcaatacaatcgccagcatggtaatgttgttgatgatcgccatcaccccgccaaaccacgcgggatcgaggttcgggttaaagcgcatccgggtttccaggcttaccaacggttcgctgttatcacggtagcgcgcgacaaagctgttcacttcaccgttgataatattctggatatacccattgccggtaaatgcctggctcatgcgcgtggcatcgacgttcacctgaatatccggctggcgtccggcgaggacatcacgctgaaaattaggcggaatatttatcgcgaaggtatagcgtccggcgtccagtccggcatccatctcatcggcggtgatcatctccggtggcaaaaaccacggacgatagaagctgttaacgatccggttgcttaactggctttgatccatatcggcaatggcgatcggcgcgaggttcaagcttcctggcgtaacggtcgcactgctatacacgctcaccgtaaagctgaagacaatcagcgtcagcatcgctttatcaccgagcagactgcgcaactctttgatacccagattaaaaatattgcgtaaatggcgcatcatccctcctgttttttcagcagcaggatacttaagcccatcaccagcgggatggctatcagtaacgggataaaaagttgccacaaatcagtcagatccagcgctttgctgaacgtcccgcgggcgatagtcagaaaatgactggtcgggtaaacctcgccgatccaacgtccaggcccttccaggctagctaccggatcgatcatcccggaaaactgtgtcgccgggatcaacgtgataatcgccgttccgaaaatggcggcaatctggcttttcataaaggtggagatcagcagccccattccggtggcaatgatgatatacagcagcgccgccagggtgagcgtcaggaaactgcctttatgcggtacgccaaacacaaacacgctcaggccgcagagcaggaaaaagttcagcatccccagcgcgatgtatggcaactgtttaccaagcaaaaattcactacgcgtggtgggggtcacgtaaaggttgataatgctcccaagctctttttcccgcaccacgctaagggcgcttagcatactcgggatcatcatcagcagaagcgggatcaccgccggaacaatcgctggcaggctttttacgtccgggttatagcgatagcgcgtctcaatattcatcagcccgctttggctggcgggtgtgctttgtcggctcgccacatcctgtaaccagctctggtgcatggcctgcacgtaaccttttaccgtttcagcacggctcggcatcgctccgtcgatccagacgccgagttccacaggcgtaccacgcgcgatatcgcgcccgaaattgggcgggatctcaatcgccaccgtgatatcgcccgcacgcatccgacgatcaagctcgtcataactggtgagcggcggctgttcgataaagtaacgggaaccggagaggttgagtgtccacgcctggctactgacggtctggtcgcggtcgagcaccgcaaagcgcaggttttccacatccatactgatgccgtaacccattatcagcatcaggatcaccgttcccatcagcgccagcgtgctacgtactggatcgcgtcgcagttccagcgcttcgcggcggctgtagctaaacagacggcgcaggctaaatccctgacgcggcgcgtgggtggtgtcgtgtaccacgggcggcgcttcggcttcgttgctctgccctgccgcttcctgcaaataggcgataaatgcctcttccagactggcggctccgcgtttctcaaccagttcctgcggtgtaccgctggcaagcacttttccggcgtgcatcagactgatgcggtcgcaacgttccgcttcgttcataaagtgggtggagatgaagatagtcactttgtcctggcggctgagatcgaccatcaactgccagaacatatccctcgccaccggatcgacaccagaagtaggctcatcgaggattaacatctccgggcgatgaatcaccgccaccgccaggctaagccgctggcgaatgccgagcggcaaactctccggcagaatatcttcaacgtcgttgagcttaaaacgctcgctcatttcagccactcttgcgggaatttccgcttccgggatgtgaaacaaacgggcatgtaactcaaggttttgccgcacggtgagttcgttatagaggctaaacgcctggctcatatagcccacccgacggcgggtatcgatatcttttggatcaaccggttgcccgaacagccacgcctcaccttcgctggcgggcagcagtccggtgagcattttcatggtggtggatttaccgcagccgttgctaccaagaaaaccaaaaatctccccgcgtggaatgcggaaattaacgtgatcaacggcaacgaaggaaccaaaacgcatggtcagatcgcgcgcttcgatggcaatctctgcgttttcaggttgatacggtgggatcactaccgcctgatgcgcctggcgttgcgcttgcggtaacagatttataaatgcttcttccagcgtagcgctttgcgtttgctgccgtagctcttcggcgctgccagttgccagcacttctccggcattcatcgctaccagccagtcgaagcgttcggcctcttccatataggcggtggcgaccagcacgctcatattgctctgccgctggcgaatactgtcgatcagatcccagaactgggagcgggagagcgggtcaacccccgttgttggctcatcaaggatcaacagttccgggtcgtggattaacgcgcagcacagcccaagtttttgcttcatcccgccggagagtttccctgccggacgatcgcgaaacggtgctaacccggtgctggtcagcagctcattgattcgcacttcccgctccgctttgtcgtgaccgaacaggcgagcgaaaaaatcgacgttttcatacacgctcaaggtgtggtagaggtttttgcccagcccctgcggcatccaggcgatgcgcgggcagacgtcgcggcgatgcttcgggtcgcgcatatcgccgcccagcaccatcacattgccctgttcaatgacgcgggcaccggaaatcaagctcaacaagctgctcttcccgacgccgtccgggccaatcagcccgaccatacagcgggccggaatatcgagagtgatattgttcagcgcaacggtttttccataatgctggctcacgcccgccagttgcgcgacaggcgggacgggaaccagttccagatgcgtcattgcggcaacctcaccacgaggtcgtcaggccacggaagttcttcattcacccgcacccacgctacgcccggcaaaccggttttgacatattccagatgctgctggagtaattccggtgggatacgcgctttgacgcggaacatcagtttcagccgttcatcgctggtttcgacggtttttggcgtgaactgggcgacactggcgacaaaactgatggttgcaggaatacgcagatctggcgcggcatcgaggatcagccgggcttcaccgcccagtttcagcgtgcccgcctgttcggttggcaggaagaaagtcatatagacgtcgctgagatcgaccatattcagcacccgaccgcctgccgccagcacttcgcctggctcggcaacccgatactgcacgcgtccgtcacgcggggctttcagttcgctgtcatcgatatctgcggcaatgcgccgttcagtggcttgtgccgcttcgacgcgggtttgcgcctgaatgatattggtgcgtgccgcttctatagccgctttagaagcgcttacctgagctttcgcgctttccagcgcagctcgggcgctctcagcggcggcgcgatcgtcatccagctgttgcgcagaaatagcccctcgttgggccagactacgggaacgcgtatgacgttttgctacggagtccagttctgcctggcgttgattaaccaggctctgtgcggcacgagtttcgctttgtcgttgctccagcaaagcctgcgcggcagcaacggcgctttgtgcctctttgatttgcgcgatggcttccagtcgctgttcctgcaacacgcgagtatccatcttcgccagcacttcaccttcgcgaacaaacttgccttctttcaccagaatggtgtcgatacgcccggcaattttgctggcaatatccacttccgtcgcttcaatgcgcccattactgacagcaaagccttccggcacacctgccgggcgcaacagccaccacgccacgatagccgccaccgccagtaacccgacaacccaccacgccagatggcgcttactcttatccataatcgacccgccataatccctgtaagcaaacgacgcgtgttacaactgccgccgaacgacgttcagcggattcttccatccgggataagaaggaaacggcaaatacgaccagcgcgcagagcattgagcgccaacggggaaggcttagtgaaaacgggtagtaatgttgtcatcatcagcattcctggccgtaaatgaaacacgcatactcataagtgtgatctataaaactggctgacaaaacggtatccatcctgttggatagcgtttcacgcctgttcagttgcaggaacagagcattcctttttacgttttatcaacagtctcaaccagatagtaacattaatattcatgttgtctatggttcagagctgtaacattgtgcgccttctaatcaaaggcataagtccatttctgtttttttcatgctggtaagacttccagggagtggttatctcaggccctgcaccagggttaatttggcaattatgcatgctgaacattcttccagcatgtttactgtcacgggcgttaagacctaaaactgtccccgtttcgcctatgcgttctcttccaccatttccgttatgtgcaacaacttgatttatacctaacatttgactacatgctaatagtgcttcaagtttaggtctgtaatctgtgctaacagaaaaataacgattaaaggatcgacaagagatagcccggctagttttaaactttttgccattaattatagcatgatgctttttattgataattgccgctaattcgaccggatcgagagcattggtcatttcatcaatagagactgttatcggtcctataatgtaacgttttcgctgatcatcaaaagttatcccatgatgatttgccattattttgtatttggggtcatagaaacatacaggataatcttttatcccagagtaggtatcctcatcgagtggtttcatacgcgtgaagttctgcatatagttaccattgcaattcgtttcatgatttccagctaatacatgaacattttcattgatactcattatgcgttttaacaaatcgatgataaattgatcaccacagatattgctaaatcgatcgccggtttggtcgcccagaaacgtacatggcgtcacagcgtctttattaataactaaataaggctgaagactttctaaaataatgtctcttctgttcaggatactgattattgtattaacattagtgttaagttgctcattaaagttctcccttagcaatacgttgagaacttcatcttctatattaagcaactggctaaggaaattttctccttcagccatgattcccaaatgtcccgttgcgaaaagcgcgaacaaaactgcaccgacactgccatcggtatcaccaaaataggttggtctggtacttgtgggatcaacgggtaaacaattggagaaatagattctgtcagcgaactggggttttatcattgtttcgaatttaatatcagatacattatattggcttattttccagttccagatgggtttgtagctctcagtaactgcaacatcattagcattatcatttactgtcatattattaagtaaataaacaatactgcaccaattaatatcggtattatcaagagagcaaccgtaatttttgctattaattgtcacaataaactgataattattattcctacgtagaatatgagcacgcatgccgcttagcatactatatttttcactatgatccgtttgtatggtaaaactaattttgtcatcttgaatagattgttggaaccgttctatttgccaatcatctattttttccacaacctcaccgagcattgtcctggcaatactacttatatcatcacctataccatttgcaatatacccaaacagttctttagtgaagttggtaacatgctcttgcaccatatcatttgttgcgattgtcgttgtactgtcgttagtgcctgccacagttccaattttcatattttacctcatattatttaccgcgaggaatacatagttaacattttatcttatgacatacacctcatgttcgatgggaaaataattatattttgcacaaatcattcagcctcaaagcataatatgaaatttcttatctcatagcagagaaagtccctaaagattgtagaggcgtcatcagaacatgcctctacaatcgattaagaaaacctatgaaatactggcaggattaaaaagacataccaccgtattcatggagttttaatgtagttgaaaacaactaagcccactggaataaattattttattatttttatcacgtgcttccttcagggaatttagccccataataccattatcaaattgttgattatgatctaccccgggcccatgatgcccatatttttgtctaatgtatttgctggggtcttcacctttgagtgtctccccacatatgaagatacgttcacgtgctggtctgaaatcagtagtgttatcaaaataattagcatatacaggtgtgggtttcaaagtattgcttcggattagatggaatagaggatcatccatgtgttctttatgttttttattaaaaatattggctaattcctcaggatcagtaggatttttcatctgattaaatggaacctgcaaagcacgctgacaataacatttttttcttcatctcttattattccgtgatgactggttaaaacttgcctttcactgtcataattacaaacatcgagcgttttaattaagttatacgtatcaccggcagagagtttatgatttgctagtcgtgcagtatagttaccattaaaattgatttcatgatttccagccagaacgacgacatttttattaatacggctatctttattaccctccatatttcgcatagaatttagcaaagtaaggatatatttatcaccaaaaatagtactaaatctatcgcctgtatgatccccaaggaagatacaaggggttatcgcatcgtcctttaaaaaaacatgttgatgcaactcattcaagatcatgtctctcgtatttaataaatcgtagagcactttattatttttatgtttgtatgcagaactagccatctcttcgtgttttaataattcacataataaactccaacccttttccctgatgcctatatgcccactaacgagcaatgcataaagtacagcgcctactcttccatctgtatcgccaaaataagccgtgttggcattttgtgggttaatcacgccacactgtttatagaagtctattttactaaacacagatttaacatagctatcaaacttttccttagtaaacgtctctttagagacatcccaacgccagtcaggtttgaaattaccactaagaagagtaaagaaatttctcgctatgatagaaagcccatcaactttataaattatatcacttttatctccagaggaattaataaaataataaccgcccttacactcaacagtaacggtaatgggagagcttaattttaacacatggttattgtctggtataattgtaaagataaacgtatcagtagtattgtcggcgaatctattatattcttgaatatctatagaaggttcactattataaaaccatactttctccatctggtgactacgatcatttaccttccagtgaccatgttgcaggaaatagatgatatgcaggccaaaatcgttatctatttggctatcattatccagtttatcaaattcaactatctttgcacgatgtgttttatcaaccttgccatggtgttgatgactgttaactttatcactatgcttatcttgatggctactagagatgtttctaatctgattgtcaattgctttcataaataacctgtgatatttttgaattgtttgtaacaaaataaatgatacttgtctgaaaaacagatttacgacgatataaaataataatacttatatgttcgctgattttaagcaccgagactatccggtcttttaccaaataatgaagaataatccctccctggaagataattgtaaaaaacaacagcataagaattaatcttaggataaatttttatttatcatggccttttgaacgctgaaaagtagcgctctgcaaagtaaaccccgctatagttatgctatgcatttgtctttaatgatatctcgtcattatattaacaggatgaaattatcattaatgcatatttcaatattagcagggatacctgaggagtttaaagtgaacatatatatcgggtggcttttcaaattaatccctttgattatgggcttaatttgtatcgcgttaggtggctttgtgctggaaagtagtgggcaaagcgagtatttcgtcgcgggtcatgtgctgatttctctggcggccatatgcctggcattattcactaccgcatttattatcattagccagctcacgcgcggcgttaatacgttttacaatacattgttccccattattggctatgcggggagtattatcaccatgatatggggttgggcactgttagcaggcaatgatgtgatggcagacgagtttgtcgccggccatgttattttcggcgttggtatgattgccgcctgtgtaagcacggtggcagcgagttccggtcactttctgctcattcccaaaaatgcagcggggagcaagagcgacggaacaccggtacaggcttattctagtttaatcggtaactgcctcattgccgttcccgttttactcaccctgctcggtttcatttggtctattacgctgttacgtagtgctgacataactccgcattatgtcgcgggtcacgtattgcttgggttaaccgcaatctgtgcctgtctaattggccttgttgccacaattgtccatcaaacacgtaatacgtttagtactaaagaacactggctgtggtgttattgggttatttttctcggcagtatcacggtactgcaggggatatacgtcttagtcagttccgatgcaagcgcccgactggctcccggcattattcttatttgcctcggaatgatctgttacagcatattcagtaaagtctggctactggcactggtatggagacgtacctgtagcttagccaacagaataccgatgattcccgtcttcacctgcctgttttgccttttcctggcaagctttcttgcggaaatggcgcagaccgacatgggatattttattcctagccgagttctggtcggtttgggagcggtatgctttacgttgttcagtatcgttagtatattagaagcgggttctgctaaaaaataattgcaacgtaccggataaaaccagcgttgaccatttgcgtaacgctggtttttcttaggcatcatgaaataacgcagcattaatgcatagtggttaagtataaaaaacagcaaagttactgtttttttcaacctgttcatatttcataaagatctggccactgagtgagttttcaatcacctttccatccaccttatattaagcatggagggtttcagttcacgggctcattagaaaataatcacaagataaccactatcaaaattagctcatttttaatgcgactctaataattttcatctttaggaaataggtcaggagctctttgctgcaatcaaatcctgcgcacaagcccacgcactgctccacgcccactggaagttatagccccccagccagccggtgacgtccatcacttcgccgatgaagtacagcccaggcactttgcgcgcttccatcgtccgactagagagttcgttggtgtccacgccgccgagcgtcacttcggcagtgcgatagccttcagtgccgttgggttgtacgcgccagtcggtcaatgtgctaatcagtgcctgttggtcacgcacgttgagctgttttaggctaacatccgggatttgcccgagttgctgtaagcgttcaaccaaccgcttcggtagatgaaccgccagtgtgtttttcaggctttgattcggatgtgcgttacgctgctcattcaggaaggtttcgaggtccacatccggtagcagattgatgctgacaaattcccccggttgccagtagctactaatctgcaacaccgccggtccagacaagccgcggtgggtgaagagtaagttctcacggaaaacggtgccgttttcagcggtaatcacggaaggcaccgccacgcccgccagcacctgtaactcttcgagcaacggtttatgcagagtgaatggcaccagacccgcgcgggtcggcagcacgttgaggccaaattgttcggcaatcttataaccaaacgggctcgcgcccagccccggcatactcagcccaccagtcgcgatgaccagcttttcgcaaccgacagtcatgccgttcagatcaagcgtgaagcctgtttcatccttcgccacactcagcacttcgctacgcaatctgaaggtcacattgcccttctcgcactcatccaccagcatgtcgacaatctgctgcgcggagtcatcgcagaagagttgccctaacgttttctcgtgccaggcgatgccgtgtttattgaccagatcaatgaaatcccactgggtaaaacgtgcgagtgcagacttacaaaaatgcggattctggctcagataagcgcctggttcgacataaaggttggtaaagttgcagcgcccaccgccagacataaggattttgcgccctggttttttaccattatcgatcagcagaacccggcgtcctgcctgacctgccagcgcagaacagaacatacccgccgcaccagcgcctataataatggcatcaaacctttccacgttgcgctcctcttagaaaaaacgggcgtgaattgtaaagattcctcagtggtcgcaccagcatcaatattactaaaaggaagtatttgcctgaattatataagataattattttttgagtgaaatccatacagggggcaaatcaaaaaaagtctatatttcactttgcccgcgccgcgaaagtcactgataatgcgccgcgttcatgtcctcaaaatggcgtaacgtcctatgctacatttgtttgctggcctggatttgcataccgggctgttattattgcttgcactggcttttgtgctgttctacgaagccatcaatggtttccatgacacagccaacgccgtggcaaccgttatctatacccgcgcgatgcgttctcagctcgccgtggttatggcggcggtattcaactttttgggtgttttgctgggtggtctgagtgttgcctatgccattgtgcatatgctgccgacggatctgctgcttaatatgggaagctctcatggccttgccatggtgttctctatgttgctggcggcgattatctggaacctgggtacctggtactttggtttacctgcatccagctctcatacgctgattggcgcgatcatcgggattggtttaaccaatgcgttgatgaccgggacgagtgtggtggatgcactcaatatcccgaaagtattaagtattttcggttctctgatcgtttcccctattgtcggcctggtgtttgctggcggtctgattttcttgctgcgtcgctactggagcggcaccaagaaacgcgcccgtatccacctgaccccagcggagcgtgaaaagaaagacggcaagaaaaagccgccgttctggacgcgtattgcgctgatcctttccgctatcggcgtggcgtttagccacggcgcgaacgatggtcagaaaggcattggtctggttatgttggtattgattggcgtcgcgccagcaggcttcgtggtgaacatgaatgccactggctacgaaatcacccgtacccgtgatgccatcaacaacgtcgaagcttactttgagcagcatcctgcgctgctcaaacaggctaccggtgctgatcagttagtaccggctccggaagctggcgcaacgcaacctgcggagttccactgccatccgagcaataccattaacgcgctcaaccgcctgaaaggtatgttgaccaccgatgtggaaagctacgacaagctgagccttgatcaacgtagccagatgcgccgcattatgctgtgcgtttctgacactatcgacaaagtggtgaagatgcctggcgtgagtgctgacgatcagcgcctgttgaagaaactgaagtccgacatgcttagcaccatcgagtatgcaccggtgtggatcatcatggcggtcgcgctggcgttaggtatcggtacgatgattggctggcgccgtgtggcaacgactatcggtgagaaaatcggtaagaaaggcatgacctacgctcaggggatgtctgcccagatgacggcggcagtgtctatcggcctggcgagttataccgggatgccggtttccactactcacgtactctcctcttctgtcgcggggacgatggtggtagatggtggcggcttacagcgtaaaaccgtgaccagcattctgatggcctgggtgtttacccttccggctgcggtactgctttccggcgggctgtactggctctccttgcagttcctgtaatcgtacgcaccaaaacgagcgggtcagctggcccgcttcagattgtgacatagtgcgctttgttcatgccggatgcggcgtgaacgccttatccggcctacaaaaacatgcaaattcaatagattgcagagattatgtaggcctgataagcgtagcgcatcaggcaattttgcgtttgtaatcagtctcgagcgggtcagtttactggcccgctttttttatgcgttattattgctgaagtgcttaatgccaaatcatcaatgcaatcaggctgaccaccaccagaccacacaatgcgctggtcagaataaactgccgacgcacccgctcacagcggcgaataaattcatcatcgtgatgatcgcgataacgttgggcatagatataccaaacgagacgcacctgtttgttgggttggccatgattggtaaaaaagccccctccatcaacatattgatagagcaatggatcgcagttacgcagtaccactaacaacgcgcgtagactactgaaatagcgcgccatgttaacaatgcaaacgacacataaagcccaaaataatgcgacggtgcttatcatacctcctccccggcgacctgcccgcggagttccaccccggggctaccgctcccgatacgctgccaatcagttaacaccaggtcctggagaaaccgcttttgtggtgaccaacatacgagcggctctatagatagtgtaggagatcaggttgttttttttccagaaggttaaccactatcaatatattcatgtcgaaaatttgtttatctaacgagtaagcaaggcggattgacggatcatccgggtcgctgtaaggtaaggatggtcttaacactgaatctttacggctgggttagccccgcgcacgtagttcgcaggacgcgggtgacgtaacggcacaagaaacgctagctggccagtcatcgacaactttatggaaggagtaacactatggcttataaacacattctcatcgcggtcgacctctccccggaaagcaaagttctggtagagaaagcagtctctatggctcgcccctacaatgcgaaagtttctctgatccacgtagatgtaaactactctgacctatacaccgggcttattgatgtgaatctgggtgatatgcagaaacgcatctctgaagagacacatcatgcactgaccgagctttccactaatgcaggctacccaatcactgaaaccctgagcggcagcggcgacctgggccaggttctggtcgatgcaatcaagaaatacgatatggatttggtggtttgtggtcaccaccaggacttctggagcaaactgatgtcttccgcacgtcagctgatcaacaccgttcacgttgatatgctgattgttccgctgcgcgacgaagaagaataatcttccctctacgacgtgttcctgaacgcccgcatatgcgggcgttttgctttttggcgcgccttgttacctgatcagcgtaaacaccttatctggcctacggtctgcgtacgcaatcaaaatccccagccaatacaacatttaacaccatcatattttccatcattagtgtgatcatctggttattttctgttgtaatagtgtattaatctattcaccgcatcaatattaagaatctctgacagatgtaaactttttcgcgcgttatcccttacgcgttcatacttttcaggatggtattggaaggttaataaatatgaatacaacaacacccatggggatgctgcagcaacctcgcccatttttcatgatcttttttgtcgagttatgggagcgattcggctactacggcgtgcagggcgtactggcggttttcttcgttaaacagcttggattcagccaagagcaggcttttgtcacttttggtgcttttgctgcgctggtctatggcctcatttccattggcggctatgtcggcgaccacctgctggggaccaaacgcaccattgttcttggagcacttgtgctggcgattggctacttcatgaccggcatgagcctacttaagcctgacctgattttcatcgccctggggactatcgctgtcggtaacggcctgtttaaagctaacccagccagcttgcttagcaagtgctatccgccgaaagatccgcggcttgatggcgcattcaccctgttctatatgagcatcaacatcggcagcttgatagcgttaagcctggcccctgtgatcgctgatagattcggttatagtgtcacctacaacctgtgcggggcggggttaattatcgcattactggtttacatcgcctgtcgtggaatggtgaaagacattggttctgaacccgacttccggccaatgagcttcagcaaactgttgtacgtgttacttggcagcgtggtgatgatcttcgtatgcgcatggctgatgcacaacgtagaagtcgccaatctggtgctgattgttctctccatcgtcgtcaccatcatcttctttcgtcaggcattcaagctggataaaaccgggcgcaataaaatgtttgtcgcctttgtcctgatgctcgaagcggtggtgttttacattctctacgcccagatgccaacaagcctgaacttctttgccatcaacaacgtgcatcatgaaattctcggtttttccatcaacccggtcagcttccaggcgcttaacccgttctgggtggtactcgccagcccaatactggcaggcatttacacgcatctgggtaacaaaggcaaagacctcagcatgccgatgaaatttactctcggcatgtttatgtgcagtctgggctttttgacggcggcagctgcgggaatgtggtttgcggatgcacaagggctgacaagcccatggtttatcgtgctggtgtacttattccagagcttaggtgaactgtttattagcgcccttggcctggcgatgattgctgccctggtgccgcagcatttgatgggctttattctcgggatgtggttcctgacgcaggctgccgcgttcttgctgggcggctatgtggcaacatttaccgcggtgccggacaacattaccgatccgcttgagacgttgcccgtctataccaacgtgtttggtaagattggtctggtcacgctgggcgttgcagtagtgatgctgttgatggtgccgtggctgaaacgcatgattgcgacgccggaaagccattaattattcttgcagaaagcagggtagcgttatcgctaccctgttttagttttacactggcgtacctgcatagatatcaaagcgatgccctttagtgactaccgcgtttggcgtggcgacattcgccagcggtggcgcgtagtccgggcgctttaccaccacgcgtttggtcgccagcaagcgtgcaggctccagtaatccatcggcatcaagatccggtcccaccaggctctgaaagacacgcatctcttttttcactagcgcgcttttctgcttatgcgggaacatcgggtcgagataaaccacctgcgggcgcggggtaatatcagtcagcgccgtcaggctggaggcgtgaattaactgcaaccgctcctgcaaccagccgccgatttccgcatccgcataaccacgcgccaggccgtcgtcgagtagcgcggcaaccactggattacgctccagcatccgcacgcggcagccgacactagccagtacaaaggcatcgcgcccaagtcctgcagtggcatccaccacatccggcaaataatcgcctttaatgcccaccgctttcgccaccgcctcaccgcgaccaccgccgaatttgcgtcggtgcgccatcgctccgccaacaaaatcaacaaagatgccgccaagttttggctcatcacgcttgcgcaattccagatgttccggcgttaacaccagcgccatcaggttgtcttcatcgtgctccagcccccagcgggccgccagaacagataaggcaccgtctccggtgcctgtttcatcaattaagcagattttcactgaatgatcagcccttaatgccgtaatgctccagcatcgcatccagctgcggttcacgaccacggaagcgtttgaacagatccatcggctcttcactaccgccacggctcagaatgttgtcgaggaagctctgcccggtttcacggttgaaaatgccctcttcctcaaagcggctgaaagcatctgccgccagtacgtcagcccacaggtagctgtagtaacctgcggcataaccaccggcgaaaatatggctgaaagcgtgcgggaaacggccccaggacggagatggcaccacggcaaccagtttcttgatttctgccagagtttcgaggatttttgccccctgatccgggcggaactcggcatgaaggcggaaatcaaacaggccgaactccagctgacgcagaataaacagcgccgcctggtagttcttcgccgccagcattttatccagcaactctttcggcagcggttcgccggtttcatagtgaccagagataaacgccagcgcctccggctcccagcaccagttttccataaactgactcggcagttcgaccgcatcccacggcacaccgctgataccggaaacaccagcggtttcgatgcgggtcagcatatggtgcaggccgtgaccgaactcgtggaagagggtgatcacttcgtcgtgagtgaacagcgccggtttaccatttaccgggcggttgaagttacaagtcaaatacgcgaccggtttttgcaaagaaccatcagctttacgcatctggcctacgcagtcatccatccacgccccgccgcgcttgttttcacgggcatacagatcgaggtagaagctaccgcgcagttcgttattttcgtcatacagttcgaagaaacgtacatccggatgccagacatcaacatctttacgctctttagcggtgatgccgtaaatacgcttaaccacttcaaacaggccgttaaccgctttgttttccgggaagtacggacgcagctgttcgtcactgatgctgtagaggtgctgtttttgtttttcgctgtagtaagcgatatcccacggctgcaactcatcgacgccaaattcggctttggcaaaggcacgcaattgcgccagctctttttcgccttgtggacgcgcgcgttttgccagatcggttaagaaatccagcacctgctgcgggttttctgccattttagtggcaagggatttaaaggcgtagttttcaaagcccagcagttgcgccagttcgtgacgcagcgcgaggatctcttccatcaccttgctgttatcccatttaccggcgtttgggccttgatcggaggcgcgggtgctgtaagcgcgatacatctcttcacgcagagcctggttgtcgcagtaggtcattaccggcaagtagcttgggatatccagcgtcagcaaataaccttccagctctttcgcttcggcctgggcttttgccgcagccagcgcgctttctggcatccccgccagctccgcttcgtcggtaacgagtttggtccagcccattgtcgcatcgaggacgttgttgctgtactggttgcccagttcagaaagacgggtcgcaatttcgccgtaacgctgctgtttctctttcggcagacctatgccagagagttcaaagtcgcgcagtgcgttatcaaccgctttcttctgcgccgtgttcagcgtggcgtaatgatcgccatcgcgcaggtcgcgatacgctttatacagcccttcatgttgccctacccaggtgctgtattcgctcagcagcggcagggtttgttcgtaggcttcacgcagttccgggctatttttcacgctgttcaggtggctgaccggggagaagatacgccccaacacatcgtccacttccgccagcggctggcagagattttcccaggtgtacggtgccccttgcgctactacgcgctccacgttttcgcggcagtcgttcaatgccttagtcacggctggaacgacatgttccgggagaattttagaaaacggaggcaattcaaagggagtcagtaacggattcgtcattcgcgcagtcctggttaaagaggttaaggaagcgctcaacaggcgctttacataatgtgtgtagcatggggttaagtgtagtgaatttcaatgagaaacgttacgctttcgcggcggcggcctcttttcggtatactgtcctgatacgcttttgtgcgccccgaatacgggccgatttttacttaccggaacacctttacccatgctcagttatcgccacagctttcacgctggcaaccacgccgacgtccttaaacataccgttcagagcctgatcatcgagagcctgaaagagaaagataaaccgtttctctatctcgacacccacgcaggggccgggcgttatcagttaggcagcgaacatgccgagcgtaccggcgaatatctcgaaggcatcgcccgtatctggcagcaggacgatttgcccgcagaactggaggcgtacatcaatgtggtaaaacacttcaaccgtagcggtcagttgcgttactaccccggtagcccgttgattgctcgcctgctactgcgtgaacaggacagcctgcaactgaccgaactgcacccgagcgattacccgttgttgcgttctgaatttcagaaagatagccgtgcgcgtgtcgaaaaagccgacggtttccagcagcttaaggccaaactgccgccggtttcccgccgtggtttaatccttatcgacccgccgtatgaaatgaaaactgactatcaagcggtggtcagcgggatagcagaaggttacaaacgtttcgccactggtatttacgcactgtggtatccggtggtgctgcgtcagcaaattaagcgcatgatccacgatctggaagcgaccggtattcgcaaaattctgcaaattgaactggcggtactgccagacagcgatcgccgtggcatgaccgcttccggcatgattgtgattaacccgccgtggaaactggaacaacagatgaataacgtgctgccgtggctgcacagcaaactggttccggcaggcaccgggcacgccaccgtaagctggatcgtgccggagtaattgcagccattgctggcacctattacgtctcgcgctacaatcgcggtaatcaacgataaggacactttgtcatgactaaacactatgattacatcgccatcggcggcggcagcggcggtatcgcctccatcaaccgcgcggctatgtacggccagaaatgtgcgctgattgaagccaaagagctgggcggcacctgcgtaaatgttggctgtgtgccgaaaaaagtgatgtggcacgcggcgcaaatccgtgaagcgatccatatgtacggcccggattatggttttgataccactatcaataaattcaactgggaaacgttgatcgccagccgtaccgcctatatcgaccgtattcatacttcctatgaaaacgtgctcggtaaaaataacgttgatgtaatcaaaggctttgcccgcttcgttgatgccaaaacgctggaggtaaacggcgaaaccatcacggccgatcatattctgatcgccacaggcggtcgtccgagccacccggatattccgggcgtggaatacggtattgattctgatggcttcttcgcccttcctgctttgccagagcgcgtggcggttgttggcgcgggttacatcgccgttgagctggcgggcgtgattaacggcctcggcgcgaaaacgcatctgtttgtgcgtaaacatgcgccgctgcgcagcttcgacccgatgatttccgaaacgctggtcgaagtgatgaacgccgaaggcccgcagctgcacaccaacgccatcccgaaagcggtagtgaaaaataccgatggtagcctgacgctggagctggaagatggtcgcagtgaaacggtggattgcctgatttgggcgattggtcgcgagcctgccaatgacaacatcaacctggaagccgctggcgttaaaactaacgaaaaaggctatatcgtcgtcgataaatatcaaaacaccaatattgaaggtatttacgcggtgggcgataacacgggtgcagtggagctgacaccggtggcagttgcagcgggtcgccgtctctctgaacgcctgtttaataacaagccggatgagcatctggattacagcaacattccgaccgtggtcttcagccatccgccgattggtactgttggtttaacggaaccgcaggcgcgcgagcagtatggcgacgatcaggtgaaagtgtataaatcctctttcaccgcgatgtataccgccgtcaccactcaccgccagccgtgccgcatgaagctggtgtgcgttggaagcgaagagaagattgtcggtattcacggcattggctttggtatggacgaaatgttgcagggcttcgcggtggcgctgaagatgggggcaaccaaaaaagacttcgacaataccgtcgccattcacccaacggcggcagaagagttcgtgacaatgcgttaaatgttaaagggctaagagtagtgtgctcttagcccttaattacgtttccgctatcagttcagaagctgaagcagaaagcggatcagttccagcagcgcaattaacgcccctagaacgatgattgctttatcaatcacccgttttctccatgcgatggagtgagaatgcatccgcttactcatccactgcctgtcacggcgcatgtctcattgttagataagaactctctcactccggccagagcatcagttaacggcaccacccgtacttctgaccaggactttgaaagcgtttatgcgcattgccagagtgaaaatgcctcagagctaactggataatcatacagtacatgcaggttataaaaccagcacgtccttgcaatagtttcagtatggtattagcattgatgcgttagatgatggctatctcactccagtcagagccaccaactcagggctggaaagtaaaaaaccgacgcaaagtcggtttttttacatccggattcggacaaggcttaatatgacgatgacccagtgaaagtatataaatcgtcactgcgatatataccgaagtgctccctccgccagctgaagaaatcgctaattcttgcaatgttagccactggctaatagtattgagctgttagataagaactctctcactccagccagagccaccaactcagggctggaaagtaaaaaaccgacgcaaagtcggtttttttacgtcctgattcagacctcctttcaaatgaatagccaactcaaaattcacacctattaccttcctctgcacttacacattcgttaagtcatatatgtttttgacttatccgcttcgaagagagacactacctgcaacaatcaggagcgcaatatgagttttctgttacccatccaattgttcaaaattcttgctgatgaaacccgtctgggcatcgttttactgctcagcgaactgggagagttatgcgtctgcgatctctgcactgctctcgaccagagccagcccaagatctcccgccacctggcattgctgcgtgaaagcgggctattgctggaccgcaagcaaggtaagtgggttcattaccgcttaagtccgcatattccagcatgggcggcgaaaattattgatgaggcctggcgatgtgaacaggaaaaggttcaggcgattgtccgcaacctggctcgacaaaactgttccggggacagtaagaacatttgcagttaaaaatttagctaaacacatatgaattttcagatgtgttttatccgggaggcattatgttactggcaggcgctatctttgtcctgaccatcgtattggttatctggcagccgaaaggtttaggcatcggctggagtgcaacgctcggcgcagtactggcgttagttacgggcgtggtccatccgggtgatattccggtggtgtggaatatcgtctggaacgcgacggctgcgtttatcgccgtcattatcatcagcctgctgctggatgagtccggcttttttgaatgggcggcgctgcacgtcagtcgctggggtaatggtcgtggtcgcttgctgtttacctggattgtcctgctcggtgctgccgttgccgccctgtttgccaatgatggcgcggcgcttattttgacaccgattgtcatcgccatgctgctggctttagggttcagtaaaggcactacgctggcgttcgtgatggcggccggattcattgccgataccgccagcctgccgcttattgtctccaacctggtgaatatcgtttccgctgatttctttggcctcggctttcgcgaatacgccagcgtgatggtgccggtggatatcgccgcgattgttgccacgctggtgatgttacatctctattttcgcaaagatattccgcagaactacgatatggcgctgctgaaatctcccgcagaagcgatcaaagatcctgctacgttcaaaactggctgggttgttttactgcttctgctggtgggatttttcgtcctggaaccgctcggcattccggtgagcgccattgcagctgtgggcgcgctgatattatttgtcgtcgctaaacgcggtcatgcgattaatacgggtaaagtcctgcgcggtgccccctggcagattgtcatcttcagcctcggcatgtatctggtggtttatggcctgcgcaatgccggattaacggaatatctttctggcgtactcaacgtgctggcggataacggcctgtgggccgcgacgctcggcaccggattcctcaccgccttcctctcttctattatgaacaatatgccgacggtactggttggcgcgttgtccattgatggcagcacggcatctggcgttatcaaagaagcgatggtttatgccaatgtgattggctgcgatttgggaccgaaaattaccccaattggtagcctggctacgctactctggctgcacgtacttagccagaagaatatgactatcagctggggatattacttccgtacagggattatcatgaccctgcctgtgctgtttgtgacgctggctgcgctggcgctacgtctctctttcactttgtaatgagatactgatatgagcaacattaccatttatcacaacccggcctgcggcacgagccgtaatacgctggagatgatccgcaacagcggcacagaaccgactattatccattatctggaaactccgccaacgcgcgatgaactggtcaaactcattgccgatatggggatttccgtacgcgcgctgctgcgtaaaaacgtcgaaccgtatgaggagctgggccttgcggaagataaatttactgacgatcggttaatcgactttatgcttcagcacccgattctgattaatcgcccgattgtggtgacgccgctgggaactcgcctgtgccgccctagtgaagtggtgctggaaattctgccagatgcgcaaaaaggcgcattctccaaggaagatggcgagaaagtggttgatgaagcgggtaagcgcctgaaataaagcggcgatatcccccccacaggttgttagaaaagtgcgctttatttatgtcggatgcgacgctggcgcgtcttatccgacctacaaagttatgaaaattcgatgaatagtatgttatttgtaggcctgacaggcgtagcgcatcaggcgattttgctatttacacagtactccctgcgtgagattccaattatcgcgtccagcatggtgtatcagtgagctgcttagttatcagcgatacagcgcagtagtttaaagacgtactggattatgatttatcagtggtttacacaacaaattattaaataattataagataccttaacccattttattattacacatctaaaacatcacaaaaaaaaatcacttcacacactatcagagaacataataactttttaaaatgagcgcattttgatagttgttaacgatttcctttacgatactatcactaccctttttttacacacaaatattaccgggtggagataaaagggaaatcaaaggtaattatatcaggaagatataacgcattacatttattgtgtgtagaagaaaatccattcctgttctaattatccaatttaaacatcttagcataaaacaaatgatgaataaggaattttatattgattattagcactttataatcattgaataaaaatagattttatgtacttttaaaacaatgcactatattatggggtgatggatattcatgtcacgccccaaaattaactgagttcacctaaacagaaaggatataaacatcagacaggtttacgttactatcaggcatatcacctcagaatcagatgaaaactataaagaaatatctattatggttttaatatttgttgataaggatagtaacatgaacatgacaaaaggtgcactcatcctcagccttagttttttgcttgccgcatgtagtagtattccgcaaaatatcaaaggcaataaccaacctgatattcaaaaaagttttgttgctgttcataaccagccggggttatatgttggtcaacaagcgcgctttggtgggaaggttatcaacgttatcaatggcaaaacggatacgttgttagaaatctctgtattaccgttggatagctatgcgaagcctgatattgaagccaactatcagggccgactgctcgccagacaaagcggcttccttgatccagtgaactatcgtaatcactttgttaccatcctcggcaccattcagggtgaacaacctggctttatcaataaagtcccgtataacttcctggaagtgaatatgcagggcatccaggtgtggcatttgagagaagtggttaataccacctataacctgtgggattacggctatggtgcattctggccggaaccgggctggggtgcgccttactacaccaatgcggtgagtcaggtaacacctgagctggtcaaataacaccaccgaaagatgcagatgctttctcagcatctgcatcatgcattacatcaaattaatacacagtaagctaactattattattataagccctgtcctgttaattacctttggcaaactgattataaagttaatgtccgcaccaggagtcggttatgtttcttataattaccagggatacgatgttcttcaccgcgatgaaaaacattctgagtaaaggtaatgtcgttcatatacagaacgaagaagagatcgacgtaatgttgcatcagaatgccttcgtcattattgatacattaatgaataatgtatttcattctaattttctcactcaaattgaacgattaaaacctgtccatgtcattattttctccccctttaatattaaacgctgcctggggaaagtgccggtgacctttgttccgcggactatcactatcattgattttgtcgcactcatcaatggcagttactgctctgtgcctgaagcggctgtgagtcttagccgcaagcaacatcaggttctgagctgcattgcgaatcaaatgacaacggaagatattctggagaaactgaaaataagcctaaaaacgttctactgccataaacacaatatcatgatgatcctcaatcttaagcggatcaatgagctggtacgccatcagcatattgattatctggtgtgaatttcaggcttacggtgagtctggctacgctgccacacagattagctaatactaacgcctttcacccctgccataccttttaataatcgcaacaggtcttctatgctcgttgtggcatgaagctggatatcaatggcgaccacttcatgatcttcattttcctgcaagctaactaaatcagtttttattttttgctgcttaaaccagtcgagcatacttaccgtattaccgttcactaatgtcagctgtaaatggtaatttttgttcatcaggcggaaggttaattgatggaagacttccagcaccaacaaggtcatcacactaccataaatacccagttcgtacataccgctgccaataaccatacctatggcggcggtcacccagatatccgctgccgtcgtcagacctacaatattttggttacgaacgagaatgttacctgcaccgataaacccgacgcccgtcaccacctgagcagcaatacggctggggtcgagtccgacgtgatctaaagacagcacgtcagcaaaaccatatttgctaacaatcataaacagggcgcttcccatgccaattaatacatgtgtgcgtaaccctgctcctttgccgcgcatttgcctttccatgccaatagcgccacaggcaattgccgcgagtataagacgtataataaattctgctgtcatataaaaatgcaaaaaggagcagcaagatggctcaacttgctactcttttttacttgcacctcattaattcggcaagtcattagatgcttgatttttgaaggtatacaaatttttctgcgggtttttcttacagtattcgatcactttaggaatttgagtgagatcggtttcatttaaagtaacggtatcgccacctttatatactgtttcttcatgcagcatccaccatgcaaccggggtcattgcttttggattcagatcaataaattcctggcaggtcatatctttagcggattcattggctgccaacgcagattgtgcgttcaccagactcaaagccgctacagcgcccataaaaataaacgctttacggagagaactaatattcattttgtaacccattcaatatagagattatatatgaacaggaggaatagctgcttttaaagaagatattccggcctgttcaatatgcaaggaagtacgatgtaacgcattcccggaattacatatctttcttaattttgtcccattcgcctttaactttatctttaaagttggcttgtttatcctgagtacaagcctgaacgatagctggggttacggttgcaataccctgaacatctaaaaccgcatcttctggtttatctttgttgttcagcgcttcagcaaaaccaactgcagttggctggaaggattcgtccacagccaggaaatcttcacaggtccaggagttgaccggttttttgttatcagctgctttttgcgcatccgctgcattgctcacaactggcagaagaagcagaccaccaagaataacgcctaatacttttttcatcgtaatatcctcaactataaagtgaaagagccgtcacgaatcaatttcgacactgaggttataacctggttttctgtatatgtcatgttgatggaaaatatcaaaatcagatatttttatttcaatacaatgagttacagatgcatcagatactgcaattaggaaatttttattaaatcgactgcattcttagacgcgtttttggcatagattgatagcaggggattttcttcttaattttatagggtggttctatgttatatatagataaggcaacaattttgaagtttgatctggagatgcttaaaaaacatcgcagagcaatccagtttattgccgtgctgctgtttatcgtcgggttgctgtgtatcagtttcccgttcgtctctggcgatattttaagcacagtagtgggtgcattattaatctgcagcggtattgcgcttattgtcgggttattcagcaaccgcagtcataatttctggccggtattatccggtttcctcgtcgcagtcgcctatttattgatcggctatttcttcatccgcgcaccggagctgggcatttttgccattgcggcatttattgccggtttgttctgtgttgcaggggttattcgcctgatgagttggtatcgtcagcgtagtatgaaaggcagctggctacagctcgttattggtgtgctggatatcgtcattgcctggatattccttggtgcaacgccgatggtgtctgtaacgctggtttccacactggtgggaattgaactgatatttagcgccgccagcctgttcagcttcgccagtttgttcgttaagcagcaataattaccccggttgtcacccggatcatagtcacttgatgtgactatgatccgattaatactctctccgctacgcagtgttgtagatcaattgcgcactatcattgaaataattacctgctagtgattatttcaacctactgaatttcatctaatttttttcactctatggcaaattagccatttcaaacattatcatggctgatattttccgtagtcaggtttaatgttttaaaagtgctgtgggaaagtgaacaaagagttccgtaagcgttgatgctatgggcggttaaataagtaatccgggttcatttttttgcaactggcgttgattacattgcataaatatccgtgtctccagacgctatataaaaacctgaagacatgaatgcgttatttactcaggtaatttcaatgcgttaaaagaaagctggcaatccaattgccagcttaagtcgaaacaaggagactcgatatttaaatcggattacattttaactttagtaatattcttcagagatcacaaactggttattgataacttattcttgggcagtaatccgcaaacgttaactttttgtttgctatttacaagctgataacaaccaggaatcttacttaggatcaatatatggagtgcgtgatggataaatctgaagtattgattagtgttaatagacgtattagttcacgaagggtaaagttcttataggcgtttactatattgaacaacgattcggacaaggatgtaaataatgaaaaggatgacatattcgaaacgataacggctaaggagcaagttatgatttttctcatgacgaaagattcttttcttttacagggcttttggcagttgaaagataatcacgaaatgataaaaatcaattccctgagtgagatcaaaaaagtaggcaataaacccttcaaggttatcattgatacctatcacaatcatatccttgatgaagaagcgattaaatttctggagaaattagatgccgagagaattattgttttggcaccttatcacatcagtaaactaaaagctaaagcgcctatttattttgttagccgcaaagaaagtatcaaaaatcttcttgagattacttatggtaaacacttgccccataagaatagtcaattatgttttagtcataatcagttcaaaattatgcaactgattctgaaaaataaaaatgaaagcaatatcacgagcacgctcaatattagccaacaaacattaaagattcagaaattcaacattatgtacaagctgaaactaagacgtatgagcgacatcgtcaccctgggtatcacatcttatttttaatcaggacataagcaactgaaattgatggctggcatgacgagggatgcagatgctgatttcattacccccggtgattactaaaggagaggctaaaacgactttattcccctggtatgtgtatccaccagtagaacccttcgttgcccgaatgctggcaggaactgttggcagaacggcaacattttttttgtcgttgacctcaccatgtcgatcactgtgcctgtatcccaccttactggctgacaaccccactatgccgctggtctgtaaatccctcatatctctcctcgcgcgcaatttaaagaaccgttatttctcaagaattttcagggactaaaatgaacagaagaagaaagctgttaataccgttgttattctgcggcgcgatgctcaccgcctgcgatgacaaaagcgcggaaaacgccgccgccatgacgcctgaggtcggtgtcgtcacactctcccccggtagcgtcaatgtgttgagcgaattgcccggtagaaccgttccttatgaagttgccgagatacgtccccaggtgggcggtattatcattaaacgcaactttatcgaaggcgataaagtgaaccagggcgatagcctgtatcagattgatcctgcacctttacaggccgagctaaactccgccaaaggcagcctggcgaaagcgctctctaccgccagcaatgcccgcatcacctttaaccgccaggcaagcttgctgaagaccaactacgttagccgtcaggattacgacaccgcgcgcacccagttgaatgaagcagaagccaatgtcaccgtcgccaaagcggctgttgaacaggcgacgatcaatctgcaatacgcgaatgtcaccagcccgattacgggcgtcagcgggaaaagcagcgtgaccgtcggcgcactcgttaccgctaatcaggcagatagcctggttaccgtacaacgtctggacccgatttatgtcgatctcacgcagagcgtgcaagatttcttacgcatgaaagaagaggtcgccagtgggcaaatcaaacaggttcagggcagtacgccagtacagctcaatctggaaaatggtaaacgctacagccagaccggcacgctgaaattctccgacccgacagtggatgaaaccacgggctccgtgacgttacgggcgattttccccaacccaaatggtgacttgctgcctggcatgtacgtcacggcattagtggatgaaggtagccgccagaatgtattactggtgccgcaggaaggcgtcacccacaacgcccagggtaaagcaacggcgctcattctggataaagacgatgtcgtgcagctacgcgaaattgaagccagcaaagccatcggcgaccagtgggtcgtcacctctggcttgcaggctggcgatcgggtgatcgtttccggtttgcaacgcattcgtccgggtatcaaagcacgagcaatttcctccagccaggaaaacgccagcaccgaaagcaaacaataacgttgcaggcttaaggggactttcatggctaactattttattgatcgcccggtttttgcctgggtacttgccattattatgatgcttgcaggtggtctggcgatcatgaacttaccggttgcgcagtatccgcagattgcgccaccgaccattaccgtcagcgctacctatccaggtgccgatgcgcaaacggtagaagacagcgtcactcaggtgattgagcaaaatatgaatgggcttgatggcctgatgtacatgtctagtaccagtgatgcggcgggcaatgcctctatcactctgaccttcgagactgggacatctcctgatatcgcacaggttcaagtgcaaaataaactgcaactcgctatgcctagtttacctgaagcagtgcagcagcaggggattagcgtcgataagagcagcagtaatatcctgatggtagcggcgtttatttctgataacggcagcctcaaccagtacgatatcgcggactatgtagcgtctaatatcaaagacccgctaagccgtaccgcgggcgttggtagcgtacaactctttggttccgagtatgccatgcgtatctggctggacccgcaaaaactcaataaatataacctggtaccttccgatgttatttcccagattaaggtgcaaaacaaccagatttccggtggtcaactgggtggcatgccacaggcggcagaccagcagctaaacgccagcatcattgtgcagacgcgtctgcaaacgccggaagaatttggcaaaatcctgttgaaagttcagcaagatggtagccaagtgctgctgcgtgatgtcgctcgcgtcgaacttggggcggaagattattccaccgtggcacgctataacggcaaacctgctgccgggatcgccatcaaactggctgccggagcaaacgccctggataccagccgggcagtcaaagaggaactgaaccgcttaagtgcctatttcccggcaagtctgaagacggtttatccttacgacaccacgccgtttatcgaaatttctattcaggaagttttcaaaacactggttgaggctatcatcctagtcttcctggtcatgtatctgtttttgcagaatttccgtgccacaatcatcccgacgattgccgtaccggtggttattctcgggacgtttgcgatcttgagcgcggtcggtttcaccatcaacacgttgactatgttcgggatggtgctggcgatagggttactggtggatgacgccatcgtggtggtggagaacgtcgagcgtgtcattgcggaagataagctaccgccgaaggaagcgacgcataaaagcatggggcagatccaacgtgcgctggtcggtattgccgttgttctttccgcagtgtttatgccgatggcctttatgagcggtgcaaccggggagatctaccgccagttctccatcacgctgatctcctccatgctgcttagtgtatttgtggcaatgagcctgacccctgccctgtgcgccaccattctgaaagccgcgccggaaggcggtcacaaacctaacgccctgttcgcacgcttcaacacgctgtttgaaaaaagtactcaacactataccgatagcacccgcagcctgttgcgttgtaccggtcgctacatggtggtctacctgctgatttgcgccgggatggcggtgctgttcctgcgcacgccgacctctttcttaccagaagaggatcagggggtatttatgaccaccgcgcagttaccttccggtgccaccatggttaacaccacgaaagtgctgcaacaggtgacggattattatctgactaaagagaaagataatgtccagagcgtgtttaccgttggcggctttggcttcagcggtcaggggcaaaacaacggcctggcgtttatcagtctcaagccgtggtctgaacgtgtcggtgaggaaaacagcgttaccgcgatcattcagcgggcaatgattgcgttaagcagtatcaataaagccgtcgtcttcccgttcaacttacccgcggtggctgaactgggtaccgcgagtggttttgatatggaactgctggacaacggtaacctggggcacgaaaaactaacccaggcgcgaaacgagctgttaagtctggcagcgcaaagtccgaatcaggtcaccggggtacgcccgaacggcctggaagatacgccgatgttcaaagtgaacgtcaacgctgcgaaagctgaagcgatgggcgtggcgctgtctgatatcaaccagacaatttccaccgccttcggcagcagctacgtgaacgacttcctcaaccaggggcgggtgaaaaaagtgtatgtccaggcaggcacgccgttccgtatgttgccggataacatcaaccaatggtatgtacgcaacgcctctggcacgatggcaccgctttctgcctacagctctaccgaatggacctatggtagtccgcgactggaacgctacaacggcatcccgagtatggagattttaggtgaagcggcggccgggaaaagtaccggtgacgccatgaaatttatggcagacctggtcgctaaacttccggcaggcgtcggctacagttggaccggactaagctatcaggaagcgttatccagtaatcaggctcctgcgctgtatgcgattagtctggtcgtggtgttcctcgccctcgccgcactctatgagagctggagtattccgttcagcgtgatgttggttgttccgttaggcgtcgttggcgcattactggccaccgatctgcgcggcttaagtaatgacgtctacttccaggttggtttgctgaccaccatcgggctttccgccaaaaacgccatcctgattgtcgaatttgccgttgagatgatgcagaaagaagggaaaacgccgatagaggcaatcatcgaagcggcgcggatgcgtttacgcccaatcctgatgacctctctggcctttattctcggcgtgctgccgctggttatcagtcatggtgccggttctggcgcgcaaaacgcggtaggtaccggcgtgatgggcgggatgtttgccgcaacagtgctggcaatttacttcgttccggtctttttcgttgtagtggaacatctctttgcccgctttaaaaaagcgtaacgtgtaaatgagagtaaggttgaacatgaaggttcagccttactctttcctgctaaccattcaccactcaacaaccagctaaccgtcaggaataccaggcttagtacacagcactgaaagtagaaaccactccagccattcgtcatcaatttgaacaacacaatactgacccacattcccgtaatcgtatgaattgtcagcttaataatcccaaacatgccgagtcttttcctcctgaaaataccgataccgcctggcaaactgcgaaagagaactagccggtagcccggcagaaatcatcagggaagagtttcacatgaagcaggtgtgagatcctgaccaatattcaaatgcgaaatatgtcaggaaaaggtacctgggctatgttgcgcaaactgatgtggcgttacaccataatattgtcgaaatgtgtttataaagtagcttgtactgctatagccacatttttccgcaatagtatgcagaggaatttgacgtaactcgagtaatcgtctggccatgctcatcctggaggcgagtaatattttactgaaacaggtattttcatcctgcaacttttttttgattagactctcgctggtatacattctttccgcgatatcgcgcagataccaacgtttggcgatatcaaagctaataaggcgttcaacttttccactaacagtgctgatgctattgaaaagtaaggggatcagttctttcttatgagaaaacatgcttaaacaggaaaggtagagcatattgctcagtatcggactatttaccccggattcattgaagctatcaaaaatcgccgtcaccagcggcatggggggactctggttaattaacaaacggtctttgctgtgtaaccctaaattgcgtggtagctgacgaatattttgtaagtaatggcaaactgtcagctcatcgatatccagtcgtcgcgtatccggactacaaaacgcaaaatcgtctgccaaatttttctccagcagcagaatactctcgttatgcaggcttattttttgctgttcatgataaatatcgaaactacgacgaatgaggatcacgctgcagacatgagtcatgattatcccttatatttcatactgcgattatttcaatttcagtatactaatgaaatgatgccagactgtttcttagcgcaaaaactgccagatttggtaggaccaaaatttatccacaaagtagttttgcataacagttaattgataataagtaaatgcagcacgaatatattttcgcacagcgtatagcttatgtttataaaaaaatggctgatcttatttccagtaaaagttatatttaacttactgagagcacaaagtttcccgtgccaacagggagtgttataacggtttattagtctggagacggcagactatcctcttcccggtcccctatgccgggttttttttatgtctgagtaaaactttataatcttattccttccgcagaacggtcagtgccgtaaaaattcccttgcgcaacaatacttgccgcgctgtcacggttgctcaatctctgcgcgcttcgctcctgatactctgtgggcgtcatcccataataatttcgaaagacgtaaatgaaatagctcacgctgtgatatccacaggatactgcaactcgcttaatactaaaaccatgtataacaataagttgcaaagcacgttgcattctacactcagtaagcaactgactataacttgtctcttcttcgcgcaattttttctttaacagacttggactcatcaacagctcgctggcgattcgggctagtgtccactcatgggcgatattattattgataaccgtacaaactcgtgttcgcatgttcggttgtaaaacgttcagaagcagcggtataaagtgctcatcctcaagaaaaacagataacaacgcaaagattaatgctcttttacgtagcatttctgcatagcgaagattcttattctggcttagttgcgcaacttcctgaaaaacaggaatatctctactacagtgatgaacgagtaaactagaaacttttttatgtgcatgaagatttaatgcctcctccttgagcatcgggagaaataaactaagcgtgtccctactcacgaatacaaaattttcaacacacttatctactcgaatttggcttgcatccgcaaaaaccaggtcaccgccattaaaatagcgatattcaccattaaccatggtgagaatatatttatgtcttgcatacgcaattagacaattcccatgtagactttgcatagttgacttaatattacataaacatattactgtttattaatgtagcacgccgccctcttaagtcaaattgattgataaataaatttaaacgaagcgggagaacaggatgataatgtgtgatgttctacgggcaggatgactggatttataatacaaaaacgtgtttaagaacacagggaaattaatagtaagcaaataatcccttttcgtgacattaaaggtaatcgctacatttaataaacattcatataacatatatcttatcaacacgatgaatagacagccaatatattattgcgattaataagcaaccgaatgcccagctgtttttttaaaggctgggcattcggtttttacaacgttatgttatcaggtgtgtttaaagctgttctgctgggcaataccctgcagtttcgggtgatcgctgagatatttcagggaggctttgtagtcttccagcaacagttcagcaaagtccatttcgaagccgcgacgacacataatgcgcatcaccacgatgtcggtggcttcaccgccgagagtgaaggccggaacctgccagccgcgcagacgcagacgttcagagaggtcgtacagggtgtatcccggatcttcaccatctttcagtttgaagcaaaccgccgggatgccttcgtccgggcgacccgtacagatgaactcatacggccccagtttggcgatttcatccgccagataagcggcaacctggtaagaggcgttctgtactttggtatagccttcacgaccgaggcgcaggaattcatagtactgtgcaattacctgacccgccgggcgggagaagttgatggcaaaagtaccaatttgaccacccaggtagtcaacgttgaacaccagttcctgcggcagcgcttcttcgtcacgccagataacccagccgcagcccagcggagccagaccgaatttatggccactagcactgatgcttttcacacgcggcaggcggaagtcccagacgatatccggggcgacgaacggtgccaggaagccaccgctggcagcgtcgatgtgcatgtcgatgtcgataccggtgtcggcctggaatttatccagcgcatcgtgcagcggttgtgggaactcatagttaccggtgtaggtcacgccgaaagtcggcaccacgccgatggtgttttcgtcacaggcttcaatcatgcgtttcgggtccataaacaactgaccggggcgcatagggatctcacgcagctccacatcccagtagcgggcgaatttatgccagcagatttgtaccggaccgcacaccaggtttggtttatccgttggtttgcctgcagcttccatacgcttgcgccaacgccatttcatcgccatcccgccgagcatacaggcctcggaagaaccaatggtgttggtgccaacggcctgaccatttttcggcgcaggcgcatgccacagatcggcaaccatatttacgcaacgcaggtcgatggctgcggattgcggatattcttctttgtcgatccagtttttattgatgctcaaatccatcaatttatggacgttttcgtcgtcccaggtctggcagaaagtggccaggttctgacgagcgttgccatcaagatataattcatcattgataatctgaaatgcgacatcatcgcgcatttcgtgcagcggaaatcgtttactctccgcgatagtagaaatggcctttgcgccaaaacgactatcgagtagttcactgcggaaatccgttaacagcttctggtccatttcgaactccttaaatttatttgaaggcaataaaaaagtaggatttatccgcaatggaagcaaggcattacaggcttaatttaaataacaaaatcctaagcagaaaaacgactttttataatataaacatttaacatgataatattaaaaacagactttattatcgtaataaaaatcgcccaaacattgctgttcgggcgatcaaattaattattgtttatcctgcatatacggcgtgtacaccccgttcagactgtgcaggaaagctacgatatcatccacatcctcctgcggcagctctttgcctacctgatagcgcagcatcagtttcaccgccccgtccagcgtcggcacgtcaccgcgatggaagtacggtgccgttaaagcaacgttacgtaaaccgggtactttctgacgcaatttatcacgctcttctttagtcacattcatacgaccaatatccgccgccgtaatttccccaaagttaaagtcttttttcagccccaacggttcaaaggaacgtccgccgagaataataccaccatgacaagttgcacatttattatctttaaataattgatagccttttttctgttgcgccgtcagcgcattttcatctccgcgcaaccatttatcaaatggggaatccggcgtaattaatgttttctcaaattcagcaatggcatcagtaatattttcgccactgaaaccttgcggatagacttcgaggaactgcgttttaagctgcggatctttttccagcttagcaataatttcgtcccaggatttgctcgccatttcaatcgggttcaacggcggtccaccagcctgatcctgcaatgttgccgcacgaccatcccagaactgctcaacgttaaatacactgttaaataccgtcggcgcgttaatcggcccaactgcgccaccaacaccaatgcttgtttttctgccatcgacgccccccgcattcaacgcatggcaatgagcgcaactaatggtgctatcagcgcttaaacggggatcgtgatacagcgcaaaacccaacgccactttttgcgcatcggtaggcagtttttgcgggatgggctgcaccggttcattgcgatgttccggagcagtatcattgctggcgtaatattccgcgcgctgttttgcaatccaggccagtatttccgcccgctcttcatcactcaccttacccgcccagtgtagcgcggtataacgcgttggtggcatagtttcatactgcatcacccattcaatcttattcaaatcgctttggctaacgggtttatcagccagcagtgccgcacgcacggcctcaaggttaaaagatttatatccaagcttaatgtcgtaatccatcaactgtttcgcgccaggaatataataataggcgggtaattctgcgctaggcgtgtggcaatagtcgcatcctttttcgcggagaaagcctaaaaccttattattttcactgacagcagatgcctgaacatcggcctgtttactgcgtttattatcgtggtaccacacataaccagataaccctaaatagcaaatcgcgacgccagccaggccgatcgcggtaatacgactgaccattttcattattcttccctcacggtggtgagttattgtgacccagaaaattttccagaatgctgcaaacgtctctgcgagacaaagccatcataaaaaacagggagatacgctttttgataggaatcaatcaattacatgaatataaactatcaataagatagcctgtgcctattacccagatcaggaatggcatatcatgattgcggcgagagcaggattgaatgttctgaaaatgaaaaacaacaccaaatcggtatttttataaattccattgatattagtgcgttatattttttgacaggttaataaacgtgatccaccgcacgctttgtcgcccaccaggcggagcgaatgactacccttaaagaaaagccgataattagcgacgaatttcggaggttggatccttatgctcaatcagaaaattcaaaaccctaatccagacgaactgatgatcgaagtcgatctctgctatgagctggacccgtatgaattaaaactggatgagatgatcgaggcagaaccggaacccgagatgattgaagggctgcctgcctctgatgcgctgacgcctgccgatcgctatctcgaactgttcgagcatgttcagagcgcgaaaattttccccgacagtaaaacctttcccgactgcgcacctaaaatggacccgctggatatcttaatccgctaccgtaaagtgcgccgtcatcgtgattttgacttgcgcaagtttgttgaaaaccacttctggctgccggaggtctactccagcgagtatgtaagcgacccgcaaaattccctgaaagagcatatcgaccagctgtggccggtgctaacccgcgaaccacaggatcacattccgtggtcttctctgctggcgctgccgcagagttatattgtcccgggcggccgttttagcgaaacctactattgggattcctatttcaccatgctggggctggcggaaagtggtcgggaagatttgctgaaatgcatggccgataacttcgcctggatgatcgaaaactacggtcacatccccaacggcaaccgcacctattatttgagccgcagccaaccaccggtttttgcgctgatggtggagttgtttgaagaagatggtgtacgcggtgcgcgccgctatctcgaccaccttaaaatggaatatgccttctggatggacggtgcagaaagcttaatccctaatcaggcctatcgccatgttgtgcggatgccggacggaagcctgctcaaccgttactgggacgatcgcgacacgccgcgtgacgaatcctggcttgaggacgttgaaaccgcgaaacattctggtcgcccgcccaacgaggtgtaccgcgatttacgcgcgggggcggcctccggttgggattactcttcccgttggctgcgtgatactggtcgtctggcgagcattcgtaccacccagttcatccccatcgatctgaatgccttcctgtttaaactggagagcgccatcgccaacatcagcgcgctgaaaggcgagaaagagacagaagcactgttccgccagaaagccagtgcccgtcgcgatgcggtaaaccgttacctctgggatgatgaaaacggcatctaccgcgattacgactggcgacgcgaacaactggcgctgttttccgctgccgccattgtgccactctatgtcggtatggcgaaccatgaacaggccgatcgtctggcaaacgccgtgcgcagtcggttactgacacctggcgggattctggcaagcgagtacgaaaccggtgaacagtgggataaacccaacggctgggcaccgttacaatggatggcgattcagggatttaaaatgtacggcgatgaccttctgggtgatgaaatcgcgcgaagctggctgaagacggtgaatcagttctatctggaacagcacaaactgatcgaaaaataccatattgccgatggtgttccccgcgaaggcggcggtggcgagtatccgttgcaggatgggtttggctggactaacggtgtggtacgccgtttaattggtttgtacggcgaaccataatatttttacagccagccgctaacttcctgctggctgtaaaattatcctcttcaggaggagatatttaacatcattgccgcctgggtgcgatttttcacttccagacggcgatacagggattccagatgcgcttttaccgttccggtactgatattcagcgctctgccgatctccttattactttcgcccgccgctaacatggttaaaatctcccgctggcgggcgcttaagcttttgagatctttaatgtccttttccggcgtcgtccgccagtctccaggcagaaacatcatccccatcgccgcactatttaccgccaacgcaaatgtctcgacggtactatcacgaggcacaatggccagcacattaaaatggataacttcctgtaaccaccgtttattgcaatccgtcgccgtaattaacaccttaacctcaggaaattgcaccacggttttttgcagcaaccagtagcaaaactcaccatcctgatcgccatcgagcataactaaggcttcagggtaactttccagcttttgccataactcgtctgcctgactggccccctgaatactcactcctggaatacgctgctgtaaactgattttcattccatgaataaatatactctgcctgtcaaacatgactatttgcataactgaatctccacctgaatacgttaaaaagacttaagtagtggaagggtattacccgcgagaaaaaataagaattcgccatttggcggtggccattctacagagatgacgtgtagaaaatagttaccgatataaatagttacagctaaacgcctgaaattacatgtcgagggcactatttaaaacaattttgaggatttccttatattggtggttagtacgcatgcaattaaaaatgaaattccgcgaccacaagccaaaataacaaacggcaaggagacaaaaataagcacaaatagccaacacgtcctctgttcactttaaagggaatcgctgaaaaatacgctctgtttaaggggattcacctttctcagaaagctattccgcccttttcctgctgagaaatcgccacattcggcatgacaacattgtgaaacccggcattagatgttagaaaaaacaataaacaatgcgatatgcgcgttactgtttcgctgtgaacaacaaagcgtcaaagaaatggataaaattcacgcaatgcagttgttcatcaaagtcgcggagctggaaagtttttcccgcgcagcggatttctttgctttgccaaagggaagtgttagccgccagatacaggcactggaacatcaacttggcacccagcttctccagcgcaccacgcgacgggtcaaactcacgccagaaggcatgacctattatcaacgagcaaaagatgtgttgagtaatctcagcgaactggacggtctgtttcaacaggatgccaccagtatcagcggtaaattacgcatcgacatcccgccaggaatcgcgaaaagcctgttactgccgcgcctgagcgaatttctctatctgcatccgggaattgagctggaactgagtagccatgaccgtccggtagatattcttcatgatggttttgattgcgtgatacgcactggcgcgttaccggaagatggcgttatcgcccgtcccctcggcaaactgaccatggtcaactgtgccagtccgcactatctgacgcgctttggttatccgcaaagccccgatgatctgactagtcacgcaatagtgcgttatacaccgcacctgggtgtacatccgttaggttttgaggttgccagcgttaatggcgtccagtggtttaagtctggcggcatgttgacggtaaacagtagcgaaaactatctcaccgccggtcttgccggtctggggattattcagatcccgcgcattgccgtgcgcgaagccctgcgtgccgggcggcttattgaagtattacctggctaccgtgccgagccgctctcccttagcctggtttatccgcagcgtcgggagctttcccggcgtgtaaacctgtttatgcagtggctggctggcgtaatgaaagagtacctggactgaccgactatactttttaagaatgaccacgacagaaggacaaaagagcggatgacgcaggaaaacgagatcaagcgtcccatccaggatctggagcacgagccgattaagccgttggataatagcgagaaaggcagcaaagttagccaggcgctggaaaccgtcaccaccactgccgaaaaagtccaacgccaaccggttattgcgcacctgattcgcgcgacagaacgctttaacgatcggctgggtaaccagtttggtgcggctatcacctatttcagttttttgagcatgataccaattttgatggtgagctttgccgcagggggctttgtgctggcctcccatccgatgttgctacaggatatcttcgacaaaattctgcaaaacatcagcgatccgacgctagccgccacgttgaaaaacaccatcaacaccgccgttcagcagcgtacgactgtagggcttgtcggcctggcggtggcactttattccggcatcaactggatgggtaacctgcgtgaagcgattcgtgcccagagccgcgatgtctgggaacgcagcccgcaagatcaggagaagttctgggtaaaatatctgcgagattttattagcctgattggtttgttgattgcgctgattgtgacgcttagcatcaccagcgttgccggtagcgcgcagcaaatgattattagcgccctgcacctgaacagcattgagtggctgaaaccgacgtggcgattgattggcctggcgatttccatcttcgccaactatctgcttttcttctggatcttctggcggttgccgcgccaccgtccgcgcaaaaaagccctgattcgcggaacatttctggctgctattggttttgaagtgattaaaatcgtgatgacctacaccctgccaagcttgatgaaatccccctctggcgcagcatttggttccgtgctggggctgatggcatttttctacttcttcgcccgtttgacgctgttttgcgcggcgtggattgccaccgccgaatataaagacgacccgcgaatgccggggaaaacgcagccttaaaataggccggatgcggcgtaaacgccttatccggcatacgattttattcggcctggctccccgtaggccggataagatgcgccagcatcgcatccggctataatgcgcacataacctcttgaaactcgtccccagagcctcttcagccatctatttgggagcaaacaatttcattccaactcataaccccagcatataaatccagttggtaacttttatttaacctgaaaccagttttatccactatttataaaattatgtgaagcatttcatagaagaaaaatcactggcctaaacattatcccctttttgcctgatttttgaccatttccgcgatttgttacacattgaaatatcacttttgctgtgcgtaatatggctattcgttagccaaaaaataagaaaagattatgcaagcaacagccacaacactcgaccacgagcaagaatacacgccgatcaacagccgtaataaagtccttgtcgcctctctcattggcacagccattgagttcttcgacttttacatttacgccactgcggccgttattgtgtttccgcatatcttcttcccgcagggcgatcctacggcagcaacgctacagagcctcgccaccttcgccatcgccttcgtcgcgcgccccattggctctgccgtttttggtcattttggcgatcgcgttgggcgtaaagcgacgctggtcgccagcttgctaacgatggggattagcaccgtggtgattggtctgctgccgggctatgccacgattggtattttcgccccgctgctgctggcgctggctcgatttggtcagggtctgggcttaggcggtgaatggggcggcgcggcgctgctggcgactgaaaacgccccaccgcgcaaacgtgcactgtatggctcctttccgcagctgggcgcaccgattggcttcttctttgccaatggcactttcttgctgctttcctggctactgaccgacgagcagtttatgagctggggctggcgtgtgccatttatcttcagcgcggtgctggtcattatcggcctgtatgttcgcgtgagcctgcatgagagcccggtgtttgagaaagtcgctaaagcgaaaaaacaggtgaagatcccgctgggtacgctgctgaccaaacatgttcgcgtaaccgtactgggtacgttcattatgctggcaacctatacgctgttttacatcatgacggtctactctatgacctttagtaccgccgccgcgccagttgggcttggcctgccgcgtaacgaagtgttgtggatgttgatgatggcagttattggttttggcgtgatggtgccagtcgctggattactggctgatgcctttggtcgccgtaaaagcatggtaatcatcaccacgctgatcatcctgttcgcgctgttcgcctttaacccactgctcggttctggcaacccgattctggtttttgccttcctgctgctggggttaagtctgatgggtctgaccttcgggccaatgggtgcgctgttaccagagctgtttccgacagaagtgcgttacaccggagcaagcttctcttacaacgtagcgagcattctcggggcttccgttgcgccatatatcgcagcctggttgcagactaactacgggctaggtgcggtggggttatatctggcggcgatggctggcttgacgttaatcgccctgctgctgacccatgagacgcgacatcagagcttgtaataagagtgaaaagcctgatgcgctacgcttatcaggcctgaatttccatacaatatattgaattcgcaaggatttgtaggccggataaggcgttcacgccgcatccggcatgaacaaagcacactttgccaacaatctaaatctgtttaattgccggatgtcagacatccggcaattatcatcacttcttcatctggctcaaaatcgtccgacactgattagcctccccttcggaaggactgatcagtgccagtaacgccgccgccggtgttaccagcgttgccagtgccgcagcaacagcaccacgggcaatcagcggtccggctttcaccccagcctgcggatttttaaacgtcccccgcacatacagcgggctacgcagtgtgataatccgaattcctttactctccggatcaatagtcaaatccagctgttcgctagcaaaacttgccgtgccggtaacattaatcaacgcgttctcagtatcgaaagcaaaaatctgcgggcgcgccacgccgttggcaatattcagattcgccgccgcgcagttcacccgcacctcatcatcaccaaatatcgcaccgacaatgtagttgccgacattcagcccaacaatctccatcaggttgcggctcaccagcccgtcattcatcaacagtttcaggttgccgttactgttgcctaaaagtgccgccacgctgttaccgctaccgcgtagttccgcgtcaccgttcatttcccccagcgtcttctgcatcagttccacatcgggcatcagttctttcagtttcagtcgacgagcctgaatatctgcccgcccctgcatcggctttttatcgccttccagatgaatattcgccgcaatgctgccgcccgccatgccaaatttcagcggttgcaggcgcaggtcagcatttttgaggatgatatgagtagaaagatcgctaatcggcaggctactgccatgctcaatgcgccgccctttgaagcgaacatcggcatccataacgtcccatttatcggtttcgaagcggtcataaggcagcactttgcccgcaggctgaacgcttttttcgcccttcttctgttcagaccgtttgctcttttctgcccctttcccggaatcaacgccaatcaacggtcccaggtccgccagccgcaattgccggctctcgacatcaccttccagttttggtcgtggctttccggtggtgtagaccagagaaccgtggatatcgctatcaccaattcgcccattaaaaccgcgataatcaaagacgctgcttttttcagtgtcgattttcgctaccagccgaccatccgtttcaaacggcggggtatcgggcagcagaacgcccgtcagttcatagagatcacccagactatcgccagaaaatttaagccgtaaatcgacaccgcccatcttcattgggtcattcacgacgccatcaaaagcaacacgggtgttaccagagcggaaatcagcctgtaccggaaacggcgtcccttcgccacgcagcgccagcataccgcctatttttcccgtacccgtgagcggttcaccgttatatcgtccctgcgccttcaggccaaaaacgtaatcgcccaccttttctttatccgctttacctttgcttccagtaacttcgctgaacggcagcggcttgcctaagggatcaacaaaaatctccagatccgctttgcttactttgtcatcaatggcgatccgcccttgatcgaaaagaatattatccagccgaaagctccatgcgctcggctttgcattcgcgtctttgttatcatcgttggcaagattaaacgtccagttattgttcttttcagagaggcgaatcaggcgcgcgtcgggcttttcgagcttgatccacggcagccagaccgttttggtcagcagcgccagcggggccagcgttgcctctacgcgtggcaaatgcaccatcgtgacttcgggaatatccggtggattgccaagaatgatgtcttccgcgtgtacatggggccacggcacccagctgcgccagccagtttcttgtttttgccgctcccacaccacgcccagatcgccacggatagcgaacggacgattcaactccgcagagactttctggttgatagtcggtttgagtcgattccagtcaaaagttgcaatcaaaatgatcgccacgacaatcaacaacaagaaagccccactaatcgcagcggttattttgcctgccttgctcatcgttcgcttcctcatattcttcctgtgccagtcctaaagatagtccagccaggcggaaaatgaggcagcttatagcgccagaaccgccgtattcagcgtttctatcggtgccgggcgactaagaaaccagccttgtgcggcgaatgcggggctgttctgaacatcacgccactcttccggcgtttctacgccctcgacaatcaccccgcgacaatagcgattcattagatgtaaaagctgagaaaagagtgtgcgtccttccgggctctgacgcagcatcacaaacagttctcgcgcgattttgatgtagtcataacgcacttcacttagcgcagagaaatttgccatcccggtaccaaaatcatccagccacagcgggccaaattcacacatgctggcaaaggtactatctttcggcagacggatatgctccaccagttcgaaacgcagccagggaagacgctcaatctggcgcaggatttttggttgctgacgcagggcgatgagcgtagggccatcaatattgacgcttgccagcaggccgtgctctataaagaagtcggctttttgcgccagcaaatcaatctgctctttcacaacctccatccgatggctgacggtgatttcagtaaaatagcgatccggcggcaggcgttggctagggttcaagggatgcgtgaccaccgttaatagctccacggccattaaccgcccgcatgtttgatagatcggctgccaggtgtaagcacgctcacactgcaaccaaaaacgccgttcctgcaagctctcgatgcttgcttcagggttgcttattcgctggataacctgccttatcatcaaagatgtcctgtgtttaaaagtgatgctgcccggactcgacaaagattatcggcgcgtaagggcagaactttaccgcctggccggggtaaatttcctcactccacaacggaatctttcaggaatacgttctggctcaaaaaaataatggaacactgttttaatatggttgaccagcaaaccaccacagcgcaaactaacgctaattttttacagatcaggttcacgactatgtccaaaaagattgccgtgattggcgaatgcatgattgagctttccgagaaaggcgcggacgttaagcgcggtttcggcggcgataccctgaacacttccgtctatatcgcccgtcaggtcgatcctgcggcattaaccgttcattacgtaacggcgctgggaacggacagttttagccagcagatgctggacgcctggcacggcgagaacgttgatacttccctgacccaacggatggaaaaccgtctgccgggcctttactacattgaaaccgacagcaccggcgagcgtacgttctactactggcggaacgaagccgccgccaaattctggctggagagtgagcagtctgcggcgatttgcgaagagctggcgaatttcgattatctctacctgagcgggattagcctggcgatcttaagcccgaccagccgcgaaaagctgctttccctgctgcgcgaatgccgcgccaacggcggaaaagtgattttcgacaataactatcgtccgcgcctgtgggccagcaaagaagagacacagcaggtgtaccaacaaatgctggaatgcacggatatcgccttcctgacgctggacgacgaagacgcgctgtggggtcaacagccggtggaagacgtcattgcgcgcacccataacgcgggcgtgaaagaagtggtggtgaaacgcggggcggattcttgcctggtgtccattgctggcgaagggttagtggatgttccggcggtgaaactgccgaaagaaaaagtgatcgataccaccgcagctggcgactctttcagtgccggttatctggcggtacgtctgacaggcggcagcgcggaagccgcggcgaaacgtgggcacctgaccgcaagtaccgttattcagtatcgcggcgcgattatcccgcgtgaggcgatgccagcgtaaacgcagcatatgcaaaaggctggataaagtgttacccctctatccagctcatccataaatacctgatggttgtgctaactcatcaccatcaggcattactgtgcaggtggaatatccgtcacttcaggatgtacgtcatccgtggcgacagaggtggtcgcagcggcggtagatggggccatgatttgatcccagaccgcctgcaacgctttcatgttaaattccggctcgcctttcggctgcagcagtattaacgccatatcattgctcaactgttgacgcagatcctgatttaacatctctaccgtcaggctattaaggaaatcctgccgcagtttctgatattgctccggcgcgatatcgacaacctgattttgcaagctacgcatccgctgacccatcagaatatcggtatcagctcgtgcataggcggcaaacagtttctgcagctccagtttcttttgcgccactaacgcattgaactcttcttccggcagacctttatcgcgaaccttcgccagttcacgcgccaccagattaaggttgctgttcagcttgtcgtttggactttcgatgttgatggcacactgcgcacgcagatacagcacacggcagtcaaatccaagaccgatgtctttgctgttactggcacttaacgcttgctgaacatgccagaacagcgcctcgcgggccaggtccgcacgccagtagcgcagcagtgcggcactttcacgaatcggctgccacggcgtatcccacatgatagataaccggtcctgacgcaccgcgtcagtcataatactcaccgcttccgcacgcagcggagaaagcgtcggcaccggagctggcgtttcacgtttgcctttcagttcgccaaacgttttgtttatttggtcgacaacgctgcgcgcatccacgtttcccaccaccagtagcgtcattgcatccggggtgtaccatttctgatagaaatctttaattttttccgcttcaacgggttgtttcagcggatcggcaggatcgtgacctaacaaggtactccctttcagacgatagcgccaccagccctctttagtatcggcaggccaggttgccaccatgtcctgactttgcagcgcgtggttgatggtttctggtgtgatggtcaatttgccagtggcatttgccagataagagagcgcttctttcagcaaatcgttacggttattgggcaaactcagattaaacagcgtggtgtcataagagacaattaccggcggcatcgggcgtttagggtcgatcccctgctgccacaaactacgcgcctgtgctgcgtcaaggccaccgctttgcgttagcgcaatacgagggatggcgtgactgtaaccgctctgttgtgtactttcggcgaggctaccggtattaaccagcaggcgaatttcaacacgatcgctgggacgctggggggtggtcagcacttgccactgtaaaccgttggaaagcgtcccctgttgccatgctggatcaggctggagcgcatctgcctgcacatagccagcagtggccatcatcagcaaaccgcccgctaaaagtcgaatttttgtgccctgcatgtgaacccctgatcaactatcctggtaataaaaaaactgcccgttgtcggtcagtctaaatgacgttaaaaacacttcgtgttagaccgcaagaacatgaaaatgtcacggaagaagtgaaataaacctgaactcacccaggtggtaagttcaggcacaggggtcaattatgcgcaaacacccgcactcggggaagggagtgcgggcataagtgatgagattaagaggataattcgtgcgttttgccatccggcgcacgattattcagcacatcgtccagttttttgtggtccagttctttcacccacttagcaacgacaatggtcgctacgccgttaccgaccaggttagtcagcgcacgagcttcactcataaagcggtcgataccgaggatcagcgccagacccgctaccggcaaatggcccaccgcagagagcgtcgccgccagcacgataaagccactacccgttacccctgccgcccctttagaagaaagcagcaacacgattaacagcgtgatttggtggacgatatccatctgactgttagtggcctgggcgataaacaccgccgccattgtcaggtatatgcttgtgccatcaaggttaaagctgtagcctgtcgggatgaccagccccaccacgcttttacggcagccgagtttctccatcttgtcgagcatacgcggcagcgcgctctcggaagaactagtccccagtacaatcagcagttcttcacggatgtagcggataaatttgaagatactgaaaccagtcgctttagcgatactacccaataccagcaccacaaacaggatacaggtaatgtagaaacagataatcagctgccccagttgcaccagtgtgccgacgccgtatttaccgatggtaaacgccattgccccgaacgcaccaataggtgccagacgcatgatcatattgatgatgccgaagatgacctggctgaaactttcgatgacgttaaaaatcagttggcctttgctgcccagacggtggagcgcaaaaccaaacagtacggcaaacagcagcacctgcagaatgttaccgctggcaaatgcgccaatgacgctcgccgggatgacatccataatgaaggcgacaatgccctggtctttcgcctgatcggcgtaaaccgctaccgctttcgcatcaagcgttgccggatcgacgttcattccggcaccaggctgcacgacgttaacgatgataagaccaataatcagcgcgatggtactgacaatttcaaagtaaagcagtgcgactgcgccggtacgaccgaccgccttcatgctttccatgcccgcaatgcccgttacgacggtacaaaagatgacaggagcgatgatcatcttaatgagcttaacgaagccgtcgccaagcggtttcatttgctcgcctatttcaggatagaaatggccaaggagaataccaatggctatcgctgtcaggacctgaaagtaaaggcttttaaacagagaggttttcatagggtgtcctttagtaaaaccacaggtcttgtaaggttatggggtacctgcggccttaaaataacacccagacaacatcacagaaatgtacctggatcataattgaaacaaaaaggttaaaaagtttgagctggctcgcacaaaccagcactttttaaagttttgtaatcagtttggggtagttacttttcttccaggtaactctcttcgaagatttcaatagggagtgggcgagcaaaaaggaagccctgggcaataccaacgcccgcttttgccagccagtcgcgttgtgcttcagtctccacgccttcggcaatcatttgtaagttcaggctctgcgccagcatgataattgcagcaatcatgctgctatctcccggcaagccttcaacaaacattttgtcgattttcagtacgtcgattggcaagcttttcatatgctgcagctgacgcagccctgcgtagcccatgccgaaatcatccagcgccacccgaactccggcattgcgcagcggacggaggattgccaccgcagcatgagggtcgtcaatacgtcggctttctgtcacttccagaatcagtgttcccggctgaatgcgatagcgggttaacagttccagcatatccgccaccatattcgggtgcatcagttgcagcgcagagaggtttacgctcaagggcagcataatgccgcgctcttgccaggctgcaagcaatcgacaggactcttccagcacccagtgaccgacggtaaccatcagcccacagcactcaatgcgatcgattaagccatccggcaggtcccaactgccatccggttactggatacgcagtaacacttccgcactgaccagtttaccgctggtcatctcgacctgtggctgtaaccaaatagcaaactgatgattttccagtgcattaaggatatcgctctcttccgtcaaccgcttctgggcggcttccatctgctgcggatcaaagaactgaatctgattcttgcctttatggcgagcggtaaatgccgcagaaatagcgcgactgtaaagctgttcggcggtgagatcgccgtagaacatcgccacgccaatgctacagtgcggacggagttgaatacgttcaatcggcaggcgctcgctcatgatagtgagcacttgctgacctaaggtgattgcgtgccacggttcctgtacaccgttggcaatgacagcaaagtcataaccgctaatctgcgcgaggatcatacgtgggctcagtacgcttttgagtttttccaccagcgtcagcagcagaatttctcgttgcgcctctttcagcacgcccgcagtatcacgcagggtttcacaggtgatgatcatcagcgcggtggtttgtttacgcgcgacaacctgctccagcatctccatcagcaaggctttgttcggcaaatcgctcaccgggaagcgcatcgcattttcgttctgttcttcataatggcgctgcagcaattgctggttgaggttgtaactgcgcaccaacataccgatttcatcgtcctgatgcagacgcggtaatgccagttggtgaccaacaagctccttggctgggatggcgttaagttcgcgagcaatattgcgtaacggatgcaaaatcaggcggttaatgcaccagctgatggcgacggtcaggataaggctcaaaagtaagtaaatggtcactaacgtactgagggtgctcatcacgaacttatacatacggaaggaatccgcctgtagtaccagataggcaattggctgcgggtttgccggacgttcgaggctgtaaacgcccaggctgatttgaaccggtagctcaaacaggcgagtaaccattaccggcaccgggcgctctggaataaaacttttacgcagcgcctggaactggttaggcagcactacatcggcacggctgaccacgcctgccggtttaatgctggcaagaatagcttccgcttcgggaatatcgcctttcaaaatagcactagataagggttcgcggacagagcgagcaatgctttccagttgcgtagccgtgttatagcgattctgctggaccagatggaacagcaaaacggtgcaaaaaataaaaacgaacaccaggacaacggctgccaccattgccatctgcttgattgttaacgagcgacttacgcgcaaattgtctccccccggaaatcccagattgccgcccgagtatacccgatcgcagcggcattaagagaggcgctatctgaaaacttaccagtcggcgtaaggtatcagcggctgcggcggtaaatccatgtcaccctgccatccggcggcggaataacgtacgtagagcaggaaatggctgggtgcgtaatctttcgcctgctggatatcaattgccgtgccaacaaaccagttggaagtaacacgtcgttcaagtaatgcccgcgccgtgtagccgaagccctgactgctgccgccatcgttggattgccgcgcagcttcttcctgccagtcggtcgggatcagattcatcagcggataacgcggcatggttttggtgcgactatggctccagctgccagacgcacccagctcccagctccagttttccgtgcgctcccgccacatcaccggtatggcaaagctcaggtattcctgcggactgtagtaaccgccctgaccgagactgtagccactcagatctttgtcgtaatgccagatcatgttgttcaggccgattgtgacgcggcgattgttctggttaatgaccttatagtaatagcccgtcatccagcgcacgcgccagttatcttcgacatttttaccggttaactggtcgccactaaggcttgcccagacgccgtttgcttcacctttatcgtagctcagacttagccccacaccgtcggcacgtacgccaccccattttttcccggtattgctcggggagtctttttgcccaccaaaggccagcaaagaactggagatgggccgacggtgggcgttaacggtgtaacccagcggcccgatatcatcgctgtaactgatgccgccgaccacatccaccacgttgaagcccatcggcgtggtaccgatatcccagctccagacgtcatttcgccagccgaccgccacgctggcaccggaatcgctctggctgcggttgccgctacagtcctgtaatgtacaggtgccccagttgtcatcccatttgccatcggcattagtggagaaactgccgacgttcatattgacgaaatcactgcgaaagaacatccgcccgtcagaatacggcgcatccacctgcaacatggtagtgtgcgctttcagatcggagtaaccaccggtgccgctgctaccccagtaatcgtgctcaagggtgacgttaagatcctgctggcgatagaggtccgccgcatcgctgcgcacgccacgtttcagccagtcatctttctcgtcgttacgggtcagtcgggtaaaggtgtcgttatcctgcggacgcgtcgtagtcacaccggatgcgaccatggcgtctttgtaggtttccagcgcctgcgttggatcgcccgcctgcgcttcaaacttcgcaccatcacgcagcaccatcgcgctttccatgctcggtggctgagattttgcctgcgggatcaacttattaaacgtccgctgcgctgctgcggtatcgccaagctgcgcctgtgccagcgccacgcgccgctgtgtgttcaggctggcgttatcggtagcgggcagtttcgccagctggctacgtgccgccgctttgtcaccggcagcaatatccacttccgtcagaccaagaatggcgtcggcgttagctggctcccgcgtcaggacattctgatatgcagcgcgggcggcggtgtaatcacgtcgttgttgcgcccagtcagccagcgtgaggtcaatacgcgtggaaggtggttgctggcgcagcatcgcttccgcttctgcctctttgccgctttctcgcaggcggttagcggtttccagcacctgatcgctttgcagtcgattaaccagctcctgaatattgctgttccactgcgcacgcggcaggctattgatatgcgccagcgccgctctgtcctggtcatgaccagagaggtacagcccgtaagcgtaaacctgctccgggtcgttgctcttctgctgcgccagattgcgcattaacgtatcggcctggctgcgttgtccggcctgccagagatcctggctaagtcggtaagtaatccatacgctgccggggtccagcgccagtcgttgccgctgaagtgctgccgcctgcgcccatttgccctggttttccagtgcctctgcctgctgtgccagacggtcgttttgcaggctgcgttcgatatcatcaatgctacgccgctgactggcagagaggctggcgataaacgcttcagctttttctgggctttgctggcggtaaatatttgccagcccgcgcacggcgttagtgttgccgctgtccatacgcaaggtctgctgataataacgttcggcggcgggataatcttttcgcgccatcgccacatcgcccagccccagcactgcataactgtcggtgttatcgacattacgcgcctgctggaacaggcgttctgcccggtcaggattattggctttcagcgcagcatcgccctgctggatcgccagccagtagcggtttactttcagcagactgttccatttgtcgttgttgctgctgtgcgggtccagtgcgagggctttttccagattcgccactgcattggcgcgatcgcctttctgagaatacgcctggcccagcgcccccagagcttcactgtctttcgggttcgcccgcaccgcctgttgtagttcgggaatggctttacccgccataccagagtccaccgccgctaaaccttgcgcacgagcgcggaaagcaggatcggccagctgtttttgctgttctgccagttggctttgcgcagccgccacgctatcgccatcactaaagatgctgagatattttttcagcgcgctcacactggcatcactgacgggcatgtctttaatctgcccgtaccagattttagaggccccttcgcgcccggcgttgctttttgccatctgttccaggacggcaaaaccttcgtcacggcgatcgctactaaacagcaatagcgccagattgttttgcaggcccgtattgcccggtgcatccgcattgatgcgttttaactgattaatcgcttcgccacggcgagccggaattttcgccaccgtactccagtactcgacagcaatgtcaccttccggcggcgcaccgttgaacagtttgttgtaactcgccacagcttcttctgcatgaccggtcgtcgcctgcaatcgtgcctgttgcagtgcctgacgaccatccggcgtggaaagtagcatcgtagtccggctgcttttatacgcattactactcggcgctaactggctcagccgatcgagctgtttttgcgcgccatcaatatcgccctgacgtaacaaagaacggaaacgggcggcaacgacgtccgggttattcggatcaataagttccagccgatataagctctgttgcaccagatcttcacgatgggtcgcttcgcctaaccgaacttgctccagcaactgttgctgagcggttggtgctgcctcgaccatcggcatgacggccagaccgagggaaagcgtgaatatgtttagtgtgaatttgcgcattcctggccccagtcaggtaattactttagtgactatttgcgcattcctggccccagtcaggtaataactcaccttttgtgctgaagcggaaacggtgttgatcccagccttgtccaaacagggtcagcacatagttgtaataggcatcgctgccgggaaagttatcggccacgcgctggcgctgaacggcctgcgcatcgcggttttgtaaaaagggcagcatggcggcagaaaaaccgactggtcctttaccctgcgctttccccgtagccacatccactttttccggcggataaccgtttttctcagtgaatgtcgccatcggtttaaaccggttgagcatccgcgctttttgcggatcgctgtcaggcatcatgcctacccacatgtaaacgcggatagcgtcgtagctgctgatcaatgttttttcggcttttagctgccagcctttgtctttctcatagcgcacccagtctgggctaaaacctttcggggcggtttccagcaataaacgttgattggtttcgcgcagcgtggtccacggcgcgccaaagcgggtgaaatactgcgccagcgtcggcggcaggtagctggggttaaaacgccagctgttatcctcagcaaaacccactttgcccggtaacaacatggaacccagcccaggcaccgtcaccacttcctcccgcgcgatacgttttagcaacgcgctgccgatgtcggtataacgctgctctttccacaaacgccccgcctccagcaagctccaggccatccagacatcaccatcggaggcgctattgctgtccagcacttcccacttactgttctctttcttgccccacagccaggcgggcaaacgttcttttaaagaaccctgagcgagattgttctgcgtccagtcgagaatattatcgaaagctgcacggtcgttagccgccagggcagagaacatgccgtaactttgcccttcggaggtggtgattttgcgcgcgtcgctggggtcgatgacgcgcccttcctgactgatgtaatcctttttaaactgctcccaggcaggccaggtacaggctgcctgaacactaaaggcagccagcagcagcatcgtcacgattccactacgcaacacattcatcttcaattactcgttatccgggttaagacgacgacgactaataattcgcagcagacgccacagtacccatgccagcaatatcacactgatagccgccagcaccgccagcagaatcggatggtttgccagcgcataccacacgcgctcgaaccacggcagatgacctacgtaataaacgtcgccaacacgtaggctgttgataccggactcgcggatcaccgcgacgctaccgaacatggtggcgcgtttgccgctatcgttcaccgcatcgttaagcatttcataaccgcgtgggctatctgccaacagcgcaatcacgctgcgctggtcgttatacgggctctggaagccaatcaccgccgccatcgcaccggaagaggtcagcgtactccgggtttctgccgcgcgatcgctctcgtccggcacaatgccggggaacggggtctggcgcatcggtgttttcacccagctttcggtcgcctgcaccaataggtcgatctgcttatcgtctttcagtttgtccgggataccaccgatgatcatgatgtcggcatctttgccctgaatggtgctgccatcatcggtcaccgtcagattaatcgccgggaagcccgtctgtgcgccgataaaaccaacagtattcagcaacgtttccatctgtgcttcgttaggcgctttcggcatcacggtgatggtttggctcagatccgccatccggctgaatgggaagcccgcgttagcaaaggcgcgtagatccggcatcgggatgaagtggtaatacttgctgaagtcgatggtggagtcgtcaccaatcaccacatgattctgcaccggctggaaggtaatacagttatccacgctaccgcccggcatcgggttcatatactcaaagtcgaagcgcagctggttggtcgcgcccagtttcagcgccggaatagagacatctgttttgccatccagcaaaccttgtaataccggaatccgcagcagcaggcggttcgcctcctgtttgctgctcaggttgaaggattgcaggaactggttattcaggctgatatccatccggctactgtctttcaccggcggcatggtgtagcggtaattaatatccatatcaatgccggtactgcgcatcaggtagagatccggcggcaggtttaggctaacgttaatcgctgctggctcaagaccgctggattgtaactgttcttcataggttttcagttcgccaaatgtgaccggacgatcggtacgtacccagttcggcgcatcgtacggcttacgcggtagcagcggtttcacttcattcactaccacgctttcaccacggaacagaatgttaccctgagcgatacctttcgctgcctgcaacaggtctttgtcgtcacgaccaaacaccaccagcagtttgacgtaaggattctgcggatggttaatcatctcaatcaccggggcttttaccgccggatgatcgcgcaggaagtccggccgtttgtcgttggttgcaaagacaatggcattgcgatccggcagttggttatagagtaccgggaagttctgcccacgccagccagaacggctaccaaaccagctggcgacaatggcagaggcttgttgcagcccaacatccggcgcacccgcaaagaccatcggcaaggtgttggtgcggttatcgctcgggtcaaagaatggcaccgggaagtgactcaggtcattcttcacattcagggtctgataggtcagatccagtccactgctccgcccaacatccagccaaagcgtggtgctggccggtttttcgcacacgtcctgataatggccgacaaactccagccgtacacggttgaagtcgctaataaacagtgggttaatgggcatttgcgccagcgtttttttacccaactgttctttggtcactggcagcacgcccatcagttcatcattgagataaacctttaactggctctggacaggcagtaagcttgggcttggggtgtattcgaagttgagcatcgccttcgtcaccacttcatcgctgcgcataccaaactcaatgctgccgttcgggttaatgccacgtagcaccatgctgcccggcggcggtgcaatttgcgcaaaggtcagcttcacatcacggctaggaccgttctgcgccacgactggcgcatcagcgccctgcacgcccggcatcacttgccccacctgcggattttgttccgtctgggcggctacagctggctcagcattgatcagtggttgcgttgctggcgtcgcctgcgtcatgaaagaggggaacgcactcatccccatagccactgcacaaatccagaatagttttcttttcatcgcgttatcatcattgttgagccaaagcctgatcgcttggttgtgccgtttcgctccgctccgggcggcgcggaataaagcttacaacccaggaaaccagagaagtcagcacacggaatatgcccttcacgctagaaggcgcaaactccgccagatggcggtagccacggaagccgagcttcagaatatccagcagactttccagcggcttatcttccgggtagctgtcctgccagagcgcccatgtatccgcacgggcaaacgtacactgcacaaaatcgatatgttgctgggtggtgagcggcattaatttcagcccaacttcattacccatcacgcgcgccacctgggtcgggaagacgtattcctgctgaccgcgtttaagcaacagattcactttctgcccttccagaatctgcgcctgaccgttgatcttgatccccaaaccaccgtcggagaaatcctgaacggtacagctgaagaggtgaccatcttcgcgggcaattgccgcgggcatcgtcatctccacgcggtggcttcggcgtacctgtttgctttctacgcttaccgcaactgcgccgccaagaacaatcaggttgtagaacacccacaccatactgacgaccacggtgagcatctcggttggcgggccatagaagtagcgccagatgcctaccgcaacgcccaccaggttgagcaggacaaggaagatgtagggccggctgatcacccagtcgacgtactcttcttccaccagtccacctttggcggtgacgttaaatttgcctttgtgcgggttaatcagcgccaccagcgtcggtggtgcgatataccacgccagcaccgtttcgtagatttcactccagaaagagtggcgatatttgccctggatcttggagttggtcaggctggcatggatcatatgcggcagcacgaatagggcgatcatcaacgctggcgcatagatgatgtaggcatgaagcagcaggaacgccagcggcgcagtcaggaagatcagccgtggaatgccgctcaagaagtggaacatggcgttgacgtaacatagccgctgagcaaacttcagccctttaccggtgagcgggttatcgagacggaagatttgtaccatcccgcgcgcccagcgaatacgctgaccgatatgcgcgctcagactttcggtcgccagccccgccgcctgcggaatacgcatatacgcggaggtatagccacgacggtgcaaccgcagagaagtatgcgcatcttcagtcacggtttcgacagcaatgccgccaatttcatccagcggcttacgacgaatcaccgcacaggaaccgcagaagaaagtggcgtcccacatatcgttgccatcctgcaccagaccatagaacagcgtgccttcgttcggcgttttacggaaacgccccaggttgcgttcaaacgggtccggactgaagaagtggtgcggcgtctgcatcatcgccagctgtttttctttcaggaaccagcccatggtcatttgcaagaagcttcgcgttggtacgtggtcgcagtcgaaaatgctcacgaactcgcctttggcatatttcagcgcattgttgatgttgcctgctttcgcatgttcatgagtggtgcgggcgatatatttcacccccacgttttgcgcaaactggcgaaactcttccctgccgccgtcatcaaggatccagatattcagcttatctttcggccagtcgatacccaggctggcgtaaatggtatttttcaccacgttgagatcttcgttgtaagtcgggacaaagatatccacgctcggccacaggctcatatctttcggcaatggcaccggctgacgattcagcggccatactacctggaagtagccgagcaccagcacaatccacgcgtacgtttcagcgaagagcagaataagcccgcacaccaggctgaccggatcgtcccagttcagcgtagaggtgtaacgccaccagatataacggcaagaaacggtcaggctcagcacaatcaacattagcgcgctgaagcgccccggcatccgccgtacgatcagcgctaccccccacagcagcatcaggaagataaactgcgccagcgggttaaacggctgagtaacgcagattaacgccagaatcaggctgaaggtgacgatgataccgaggatcaaccgccgcgccccggcactcaaatgaccgagctcttttttctcatccagatgctgtgttttatggctaacgcgctcaggcagctcgttcatccattgatggtaacgtccacgaatattttgcagaccactaaatgcccgcctgcgcggtttcggcgtttctttgcggcttgcaccgatcaataaccagcatgtttgaatgagataacggaccgggtccagcggacgcggacggctggcgttgatatgcggatacaggtttttatgttctgcgcgaatacgctgccagcgcgggtgctccagcggaataaaaatccaggccaggatcatccagaaacagccgagcgtcgcgctgaaagcgctcgcaccgtgacgacgataatcgcgataacgcccgataagccgcgcgttgaccggcgggataagcaaccaccgggtcaggatactcatgatgcactcccgactggcgtttacatcaacttgcactcccgactggcgttttcagcccggagtagttcaacaggcaccagttcgccagcgtcagtatctcttcagccgccagcgcatcactgcgatattcacctactggttgcttagccgccaggcattcagccatcgcttcatcacgatgaatgagcatcggcagtaatcggcgctggctttgcaaccaaagctggtaaatatcgtcctgaacctgactgccaatacggaagtcattaatcaaaatatgtgcgccatccggcagcgcttgctgatgcagtcggatatggcagttggcatccacattgacgattgccaggctgtgatcgcacaaactcagcagctggtgggttatctggctggcatcacgcggtaagtcgattaaaatccactggtaacgcccgctggcttttagttgctgtaagccggagcaaatatcgctcagccgggtttgccagtgctgtggattttcttgttcttcaatggataactgaccaaaaggcagcaaatcgagctggctggtgtagcgcaacccagcgtcacgccagtcctggccatccagcatcgctctggcccagccctgacggtgggtaaaatcaacattaaaactcaggcgcaacaagttgtccgggcaggcatcgaccaccaggacattttctcccaacatttgtaaactccaggctaatgcggcggtgatggttgttgtccccacgcctccccgcaccccctgctatcccagtacggccattcaccaatcccttacttttgttgcgcaaactctgccagcaacggccagcgttttaatgccgcggccaactgttcgcgttgggaaatatcggcataatcaatatcaggcagactaaatgcctgctttaacgccacaatatcattctggaagatatagcctatcgcgggatcaggcagagtatctggttcattgttattcattttgcttgatccctatgaaataaccgtaccgttcatgagacaattctaaccgtgagcatttcgccggtttattgtttacggcgagacgggaatttgctcactttttgactttccgttacgcaacagaaaaagttaaaaacgaaaagactaaaatcacacgtcttgtgaccttctaaattgattcacatgctaaatctgataagttttaatttcaatggtaggtttatttcttagctttcgctagtaaactgataatcagacaaaatggtgacatgagggacattgtggaccctgtattctctatcggtatcagtagtttatgggatgagctgcgacatatgccagcaggcggcgtctggtggtttaacgtcgatcgccatgaagatgctatcagtctggcgaatcaaacaattgcatcccaggctgaaaccgcacacgtcgcggtcattagcatggacagcgatccggcgaaaatctttcaattagatgattctcaagggccggaaaaaataaaattatttagtatgctaaatcatgaaaaaggtctatactatttgacccgtgatttgcagtgttctattgatccccataattacctttttattcttgtttgcgcaaataacgcatggcaaaacattcctgccgagcggcttcgcagttggttggataaaatgaataaatggagcaggttaaaccattgtagccttttggtaattaatcccggaaataataacgataaacaatttagtttgttgcttgaggaataccgtagtctttttggtcttgccagtttgcgttttcagggtgaccaacatttgctggatattgccttctggtgcaacgaaaaaggggtcagcgcccgtcagcagcttagcgttcagcaacaaaatggtatctggacattagttcaaagcgaagaggcggagatccaaccacgcagcgacgaaaaacgcattctgagtaatgttgctgtactggaaggtgcgccgccgctaagcgaacactggcaactgttcaacaataacgaagtcctgttcaatgaagcccgtaccgctcaggcggcgacggtggtcttttctttacagcaaaatgcgcaaatcgagccactggcccgcagcattcataccctgcgtcgccagcgcggtagtgcgatgaaaatcctcgtgcgggaaaataccgctagcctgcgcgccaccgatgaacgtttgttattggcctgcggtgcaaatatggttattccgtggaatgcgccactctcccgttgtctgacgatgatcgaaagcgtgcaagggcagaagtttagtcgctatgtgccggaagatatcactaccttgctgagtatgacccagccgctcaaactgcgtggtttccagaagtgggatgtgttctgtaatgccgtcaacaacatgatgaataaccctctattacctgcccacggtaaaggcgttctggttgccctacgtccggtaccgggtatccgcgttgaacaagccctgacgctgtgtcgccctaaccgtaccggcgatatcatgaccattggcggtaatcggctggtgctgtttctcagtttctgtcggattaacgatctggataccgcgttgaatcatattttcccattgcctactggcgacattttcagtaaccgtatggtctggtttgaagatgatcaaatcagtgccgagctggtgcagatgcgcttgcttgccccagaacaatggggcatgccgctgcctttaacgcaaagttctaaaccggtcatcaatgccgagcacgatggtcgccactggcgacgaataccagaacccatgcgactgttagatgatgctgtggagcgcagtagttgatataagatgctgtggagcgctcatcatgatgaccatcagcgatatcattgaaattattgtcgtttgcgcactgatatttttcccgctgggctatctggcgcggcactctttgcgacgcattcgcgacaccttacgtttgttctttgctaaacctcgttatgttaaaccggccgggacgttacgccgcacggaaaaagccagggcaaccaaaaaatgactcaatttacgcaaaataccgccatgccttcttccctctggcaatactggcgcggcctttccggctggaacttctattttctggttaagttcggcctgttgtgggcgggatatcttaacttccatccgctcctcaatttggtgtttgccgcgtttctgctgatgccccttccgcgctacagcctgcatcgcttgcgccactggattaccctgccgatcggctttgctttgttctggcatgacacctggttgcctggcccggaaagcataatgagccagggtagccaggtggcggggttcagtaccgattatttaatcgaccttgtcacacgctttattaactggcagatgattggggccatttttgttttattagtggcctggttattcctgagtcaatggattcgcattaccgtttttgtggttgccatactgctatggctgaacgtacttaccctggcgggaccaagtttctccttgtggccagccggacaaccgacgaccactgtaacaacgacgggtggtaacgcagcggcaaccgttgcggcgacgggtggcgcaccggtagtgggtgatatgcccgcacaaactgcaccgccaacaacggcgaaccttaacgcctggctgaataatttctataacgcggaggcgaaacgtaaaagcaccttcccgtctagcctgcccgctgatgctcagccatttgaactactggtgattaacatctgtagcctttcctggagcgatatagaagccgccgggttgatgagccatccactgtggagccatttcgatattgagttcaagaactttaactccgccacctcctacagtggcccggcggcgatccgtttactgcgcgccagctgcgggcagactagccacactaatctgtatcaaccggcaaataacgactgctatctgtttgataaccttagcaaactgggctttacccagcacctgatgatgggacataacggccagttcggcggttttttgaaagaagttcgcgaaaatggcggcatgcagagcgaattgatggatcaaacaaatctgccggttattttgctgggctttgatggtagcccggtttatgacgataccgctgtgcttaaccgctggctggacgttaccgaaaaagataaaaacagccgtagtgccacgttctacaacacgcttccactgcatgacggcaaccattatccgggggtcagcaaaacagcggattacaaagcgcgggcgcagaaattctttgatgaactggacgccttctttactgaacttgagaaaagcggtcgtaaagtgatggtggtcgtggtgccggaacacggcggcgcgctgaagggcgacagaatgcaggtatctggcctacgtgatatccctagcccgtctatcaccgacgtccccgttggggtgaaattcttcggcatgaaggcaccgcatcagggggcaccgattgtcatcgaacaaccgagcagcttcctggctatctccgatctggtggttcgcgttctcgatggcaagattttcaccgaagacaatgttgactggaaaaaactcaccagtgggttgccacaaacagcaccggtctccgagaacagtaatgcagtagttattcaataccaggataaaccgtacgttcgcctgaacggcggcgactgggtgccttacccgcagtaagaacgaaaaaggccgcagagtttcccccctgcggcctggtccgggcgcaaattgccattacggcagcctgacgcccgcatgacacgttacttccgcttgttcagccagttcacgatcatactggcaagaatgccagcaatgaccggagccgctaaatcatgccagaaggccatgcccagctctgcgaacgtcatatagccgcctgtgttgtaatgacaacgtttcgcggctattcttgagtggtctagagtcaagattagcccccgtggtgttgtcaggtgcatacctgcaacgtgcgggggttttctctctccagcaaccaatgccaccagggataaagcccccgcaacattgcgcctcaccggaacctttccggcttgccgctgattctacgattgctttttactgtcagcacccggcaatcttcctcattgcgcgatgccttccagcttaatttctttatttgcaatagttgcagttcatatccgggctgactccagactggtagtgaaatgcgcaattttgtagaattgcgcctcctcgcgacctccccagtgaatctgttgcctcattttttacatactgcgtattcgacttctccacctgttgcgcaagagaaactgggtttattcatttttgcgaggccgacttctttctggacaggactttatgcagcacaacacactaagcaaacacaatcagaaattgccgtttacacgctacgacttcggctgggttttattatgcataggcatggcgattggtgccggaaccgtgctgatgccagtacaaattggcttgaagggaatttgggtatttattaccgcagcgatcattgcttatcctgccacctgggtagtgcaggacatttatttaaaaaccctttctgaaagcgattcctgtaatgactacaccgatattatcagtcattacctggggaagaactggggaattttcctcggggttatctactttttgatgattatccacgggatttttatctactctctctccgtggttttcgacagcgccagctacctgaaaaccttcggtttaaccgatgccgatcttagtcaatctctactttataaagtcgctattttcgccgtactggtggcgattgcgtctggtggtgaacgattactgtttaagatttccgggccaatggtggtggtcaaagtagggattattgtcgtgttcggttttgcgatgatcccgcactggaatttcgccaatataaccgccttcccgcaagcctccgtctttttccgcgatgtcttgcttaccattccattttgcttcttttctgcagtatttattcaggtacttaacccaatgaatattgcctatcgtaaacgggaagcggataaagtactggcaacccggctcgcgctgcgtacccaccgaattagttatatcacgctcatcgcggtgatcctgttttttgcctttagctttaccttcagtattagccacgaagaagccgtttctgcctttgaacaaaatatcagtgcactggcgctggccgcgcaggtgatccctgggcatatcattcatatcacctctacggtgcttaatatctttgccgtactgaccgcattctttggcatttatctcggtttccacgaggccattaaaggcattattctcaatctgttaagccgaattattgataccaagaaaattaacagtcgcgtgctgactctggcgatctgcgcttttatcgtcattacgttgacgatttgggttagctttcgtgtaagcgtgctggtgttctttcagttgggaagcccgttatatggtattgtgagctgcctcattccgtttttcctgatctataaagtcgcacaactggaaaaacttcgcggatttaaagcctggctgattctgctgtacggcattttgctatgcttgagcccactgttgaagctgattgagtaaaccggagcgcatggccccggttttgtgagttaacgctgcggattttcatcctgatcaacagcaaaacaagctaccagttgaccgccgtagtcttttagctgcggctgcaactgggtgcaggggccgaagcgccgacgacagcgggcgttgaaggcgcaacccggcggtggattcagtgggcttggtagttcaccgctgagcttgatgcgctcgcggcgatcgtccgggttcaggcgcggcgtcgcggaaagtagcgcctgagtgtacggatggcgcgggttattgaagatttggtctttcgttcccttctccacgcagcggcccaggtacatcaccatcacttcatcagcaatgtgctccaccacgctcaggtcgtgggagataaagacataagacagccccaactcctgctgcaaatccatcatcagattcagcacctgcgcgcgcacactaacatccagcgcggaaaccggttcatcggcaatcaccacatccgggtcgagcatcagaccacgggcgatggcgatacgctgacgctgaccgccggagaacatatgcggatagcggtcatagtgctcggttttcaggccgactttcgccatcatgctcagggctttttcccgacgctgttctttgcttaagctggtgttgatcagcagcggctcttcaagaatttgcccgacttttttacgcggattcaggctaccgtaagggttctggaagacgatctggattttctgccgacgcagcttctgcgcctgcggatcgtgcttaagcagatcctgcccctggtaatacagctcgccaccggtgggcatttcaatcatcgtcagcaaccgaccgagggtgcttttaccgcagccagattcgcccactactgccagcgttttgccacgttcaaggttaaagctaacgccatccagcgctttaaccagacgttccggcgcgaacatgcctttcttcaccggataatgttttttcaggtcgatagcctgcaacagcggttgttgcagggtggcctcttgcgtactcatagtgtcggcctcccggcatcatcaagtgggtaatggcatttggactgacgcccgtcagcgagcatattcagcgccggttcttcagcgcgacatctgtcagtggcataggggcagcgcgggttaagcaggcagccgttcgggcggtcgtacttgccgggaacgacacctggcaagctcgccagacgttctttgtcctgagcaaattctggcagcgcacgcagcaatgcctgagtatacgggtgacgcggcgcatggaagatggcgtgcgcatcaccggtttccaccacctggcctgcatacatcacgatgattttatgtgccgcttccgccaccagcgccaggtcatgggtaattaacaccagcgccatgttctctttctgctgtagctccagcagtagttcgatgatttgcgcctgaatggtcacgtccagcgcggtggtcggttcatcggcaatcagcagttttggccgacaggcaatcgccatggcgatcatcacgcgctggctcatgccgccggaaagctgatgcgggtaaacatccagacggcttgccggatcgggaataccgacctgattcagcaggtcaatcgctcgctgacggcgggtacttttgttgccgccctgatgcaccttaatcgcttccataatctggaaacccacggtgtagcacgggttaaggctggtcatcgggtcctggaagatcatcgccacttcggcacccaccaggttgcggcgctctttttcactgatacgctgcaaatcctggccgttaaactccagtttttctgccattacgcggcccggataatcaatcagccccataatcgccagactactgacgctcttaccggagccggactcacccacaatcccgaccacttcgccctgttttacgctgtagctgatgcggtctacggcgcggaacggcgcgctttcgtcgccgaaatgcacgcttaatttatctacatttaataacgccatctcgaacctcttactgcttcagtttgggatcgagcgcgtcacgcagaccgtcacccatcaggttaaatgccagcaccgtcagcaggatcgccagacccgggaaggtcacgacccaccaggcgctttgcgcgaactgcaacacgtcggagagcatggtgccccactcaggcgttggcggctgtgcccccatgccgaggaaaccaagagcagccatatcgagaatggcgttagagaaaccgaggctcgcctgaacaatcagcggcgcaaggcagttcgggaagatgttaataaacatctgacgcatcgccccggcacccgccacgcgagacgcggtgacgtaatcgcggttaacttccaccagcacggcggcgcgggttaagcgcacatagtgcggcaaggcaacgaaggtcagtgccagcgcggcgttaccaatgctcgggccgaaaattgccaccagcaccagcgccagcagcagacttggcagcgccagcatgatatcgaccacgcgcataatgatgttatcgaccaggccgccaaagtaaccggcgatcaggccgagaataacgcccataatcaggcttaacacaattaccagacagccaaccagcaggctcaggcgcgcaccgtacatcaggcggctcagcacatcacggcctacgtcatcggtgcccagcaagtgcgccatgctgccgccttcctgccaggctggcggggcgagcagtgcatcgcggaactgttccgccgggttatagggtgcaatccagttggcaaagatcgcgatgaacagcacgatgacgacgtaaaccagcccgacgaccgcgcctttgttgcgtttaaaatagtgccagaactcctgtaacggggtcatcggcaccggtgcgctaatcactttattttcagtaacctgactcatgatgtccccttacttcttatgacgaatacgcgggttcaccacgccgtacagcagatcgaccagcaagttgacgaggataatcatcgtcgccaccagcaatacgccgccctgcactaccggatagtcgcggcgttgcagtgcgtcaatcaaccagcgtcccagaccgggccagctgaagatggtttcggtcagaatcgcccccgccagcaatgttcccacctgcaggccgataacggtcaccaccggcagcatcgcgttacgcagcgcatggacgataatcacccgcatgcgggttagccctttggcgcgcgcggtgcggatgtaatcctcgcccagcacttccagcatgctggagcgtgtcatacgcacaatgaccgccagcggaatagtacccagcacaatggcaggcaagatcatatgggcgacggcatcgataaagttgccgtcttcaccccagatggcggtgtcgattagcataaaaccggttaacggattggagtcatcgaggaacaccatatcgctcacgcgaccggagacgggcgtcaggttccagtgcacgctaaccagcatgatcagcatcatgccccaccagaagataggcatactataacctgtcagcgccaggccaaccgctgtgtgatcgaaaatggaaccgcgtttaaccgcagccagcacgccgaccggaataccgactgccgtagcaaaaatcatcgcgcagacgccaagttccagcgtggcctggaagcgcggcacgaactcttcccaaaccgggatgcggcttttcatactaatgcctagatcgccatgcataacgccccaaatgtaatggagatactgctgccacatcggtttatctaagccgagttcagccagcagctgcgcgtgacgctctggggagatcccacgttcgcccgccatgatcatcaccggatcgcccgggatcatgtggacaaaggcaaatgtgagaagggtaataccgataaacgtggggatgacgagtcccaaacgtcggagaataaactgcaacataacccggattctctatagtgacccgcagcctggaactgcgtgtctgtattgctcacaaatcaattcccgcccttatcggacagggaatgaagtattgctgccggatggcgctgcacgcagaggcacagcgccaccgggtatacagattgttgacaaagtgcgctttgtttatgccggatgcggcgttaacgccttatccggcctacaaaatcgtgcaaattcaatacattgcagaattttcgtaggcctgataagcggagcgcatcaggcatttttgcctttgccatcagtcttgtatggcttttaattattcgatagagacgttttcgaagtgatgtttgcctaatggatcaaccacatagcctttaacttctttacgtaccggttcaaacacggtggagtgagcgatgatcagtgccggagcctgatcgtgcatcaccacctgcgcttgtttgtacagttcaacgcgtttattgtggtcgtcggtagcacgcgccggttgaatcagatcttcaaacggtttgtagcaccatttactgtagttggagccttgttcagaggcggcgcagctgaacaggatggcgaagaagttatccggatccccgttatcgccagtccagcccatcattaccgtctggtgctcgccatctttcgcacgcttgaggtactcaccccattcgtaggtgacaattttggcctgcacgccgactttcgcccagtctgcctgaatcatctccgccatgcggcgagcgttcgggttatacggacgttgtaccggcatcgcccacaggtcgatggagaaacctttttccagacccgcttctttcagcaaggctttcgctttttcaggatcgtaggtgtagtcctgaacgtcgtcgttatagccccacatggttggcgggatcaggtttttcgcacttacgcccgcgccctgataaaccgctttgatgatcgcgtctttgttcaccgcgtaggtcagagcctggcgaactttcacgtcatcgagtggttttttctgcacgttatagctgagataaccgacgttcagccccggcatttccatcagattgatggatttatcctgcttcatgcgagcgatatctgccgggttcgggtacggcatcacctggcattcattcttctgcaatttcgcgtaacgcacggaagcgtcaggggtaatagagaaaaccagcgtatcgatctgcggtttggtgccccagtagccatcaaacgctttgtagcggatacgggaatctttttgatactgctgtaactggaacggaccggttccgattgggttgaggtccagtttttccggtgtaccggctttcatcatcgcatcagcatattctttactcagaatagaggcgaagtccattgccaggtcagcgaggaacggcgcttccgggcgagtcagcacaaactgaacggtgttgtcgtccacctttttcacttcactgatcagctctggcaagcccatgccttcgaagtattcgtagctgccgccagaaactttatggtacgggttttgcgcgtttttctgacgatcgaagctgaacaccacatcatcggcgttcagttcacgcgtcggtttgaattctttattgtcgtgccacttcacacctttacgcagatggaaggtataggttttaccgtcttcgctgacttcccacttttcagcgaggcccgggatcacttcggtggtgccgattttaaattcaaccagacggttataaagcgggacggaagaggcgtcataggtggtgccggaggtaaacagctgcgggttaaacccttccggagatccttcactgcaataaaccagagttttagcctgaacacttgctgcgacggtcatagccaccaggctgagaccaagcttcagcatcccactctttttcaaggaaatacgcattattctgctccaattgtgatgtttgttgttttaaccctttgcagtgggttgtcgctgcctgaccttttttgttttttgcccggtcgggtcaacgttatgaggtggggatgccgtactaattaacatcagtgtaacagtgcggatcctccataaaatgcccctcgtgacctacaatctgtcaacagaatgtgaaaacgtcaatacagccaaccgggatttacaccaacggtgagaatccacacacaaagattaaaaaaacttcaaacagctatttgcagcagagaaatttgtgctactccaacatgaccagaacaatcagcttaatatttagcaacatttggtgattaagttttatgcatttaatgaaaaaaatctgaggaaaaggtggatatctgagcgattaataccatgaacgctaaaacgcacagcggaaaatgccagggccagccataagtaacgcaaaaaaagatttaagcaaatataaaaaaagacaatggtttctgtcacaaatccgttaatggatagtgagatatggggcgcaaatttggcagggaaatgtgtgtcgtgtaggtcgaataaggcggtcgcgccgcatccgacaatggccggcacatttgcctgatgcgacgctgacgcgtcttatcaggcctacgtcgagtcgaacctccctgcccccggaggttctcatcctcatgagctgcagatgcaaaaaagcctgctcgttgagcaggcttttcgaatttggtcggtgatagaggattactcgccacttcgtggctcgccctgcgggccgttgctggcgcaacgttctctcgcttcgctcgagtcgaacctccctgcccccggaggttctcatcctcatgagctgcagatgcaaaaaagcctgctcgttgagcaggcttttcgaatttggtcggtgatagaggattcgaacctccgaccccttcgtcccgaacgaagtgcgctaccaggctgcgccaatcaccgaatgcggggcgcatcttactgcgcagatacgccctcgtcaatcccttaatagcaaaatgccttttgatcggcgagaaagtcagcaggccgcttagttagccgctgcctcttttgcctgcgggatgtgacaccagttgttgttttcgttaattccaccatccggactagtatagccaagacaacccatgatggtatcgtacagctctacgtgacggcgtggcactttcatgtcggcttcttttttcagctgcgcaaacgcctgcgcattggccggattttccagatatttatcactcatccagaccatcatcggtacgcggaactgctccggcggtgccagttcacgcggcgtgccgtgcaggtgctcgcgttcattaatactctcaccgtggtcagctgcgtagaacacaatcgctttcttatcgcgaacctgatcaatcacgctggagataaagtgatccacataggtcacgctgttgtcataggagttgatcatctgcgctttggtacagccgctatcaacaccaatacattccggcttccactgcgcgaagctacgcggataacgctgggtgtagttaaaatggctacctttggtatgcagaatgatcagatgcttaccatccgggttgcgccctaggctttgctgcatttcgtctaccagcaacatatcatctaccggcttgccacgattacgtggctccgcaccaatctgctcacgataagcaatgttgtccgccatcgtgttgctgtagaaccacatttcgctctgcatagcgtagaggtcagaactgaatcctaactgcttcagaaccgcgaaaatgttctgttcttttaatgtgcgctgcggattatcttccgcgcccccctgacgtacaaacatgcaacgcagactgagtttggttgcggtatcacaggagtaaccacggaacgccgccagatttttctcctgggccagtttcggcgtggtattacgctcatagccgaaaatacccatatggtcccaacgcgtggtttcaccgatgataaacacgacataagtgtcatcaacgttttgcggtgcctgataagtgaatttcttcgccggattaagcaaactattattatcggaagattcatcgacccgcgcccaggcatacagccccaacgcagaaagccagttacttggcagataagagttcgctacgacaccgccataactcggcaaatcaacgccggtcgccctctccactttcttctgctggatatccagcaaacgaatcggtgcccaaaccataatacccgccagtacgacgaccgccaggctgcgaatacgctgccctggggttcgcagttgtcggagcaaggtgtagcgacagcggttattccagataaggataagaggcaatgcactaacggcgattaaccagagaataaagttcagaccaacaacttctttactcaggtcgatatcggtggtcatgacggaagcgatgatgccataaccaatgaccacattaaggaaggtcatgtaatagctggcacctgcggaaaagagcaccaccaggcttgccagaatacgccagctgcggcggccaaacaggctaagaagacgtagtaaaaagaaggtcaccagtacggtggcggccagttcaacaacagcagaaatgcctttccagacggtaaaatcgtgcgcatagctgccgaagcggcggtaaaaaaccgcgccattcataaaaaggccaatatagattgcaagcaaaaagctcagcttctgctgtgtaatgcttttgatgtatctcatgcaaacaaaccctggacaaacaggtgataacaccctgcttagtggcttttcaggcccggcagggaaaaagtgcggaggtagtcagataagtaaaatctacacgcgcgaataagtagaccacagcaaagggaaaaagtgtggggaaagagtgtgcatgaagcacaaatttacaaaaatgcaagtttgaaaagagactttagcgttacaaaaagcagtaaaaagggccagttaattggcccaaattttacgagtcattgtttatacatttcgttgatgcgtttgatgcacacggaagctgaagcccagtagctcgcggctgagcattaaagggagccatgcgcctcacgcaacattttctgctctggctgacgaatcgtcgtagaaagcgccaaactcagaatcagcagggcgaaaatcacgtagaaggtcacatagaagccgccaaacagactggcgataatgctaccacaaatgctaccgataccgaaaccgagataaatcacaccgtagtttttcgccaggttattgaggccaaagaactcactgaccagactcggaaagacggtaatagtgccgccaaagttaaatgccacgcaggcaatcgctgcaaagaacgtcactgcattcaatggtgcaaacagcagggccgccatacccaccaggcttatcacctgaccaatggtaataacacggatacgggcgattttgtcagacagaatacccagcaccagacgaccactaaggttggcgatggaaataacagtgactgcattggctgcggaaaccacatcaaggtgtgccagactttgggcgatatctttcgctaccccaatcacgtacaggccgctcatgcaggcggtcaggaacattaccgctaacatccagtactgcggtttacgcatgctctctgccagcgtgtaatctttctccaccacaccattgctggttttcacttcctgttttggtgcgtctttcattaacgttgcgccgaaaacaatcatcaacagcgcaatcgctccccaaatcacaaaggttttttccagaccgaccgtttccagcagctgcgtgtcgataaatttgaaacccaggctacccagaccataagaaccgatagcgaacgcggagatcagacctttacgctccgggaaccacttcacacagttagagagcgtcagcagataacccgcgccatctgccagtcccaccagcacaccggcgcttaaccacagcatcatcaggttgtcagaatgcgctgtcaggaagaagcctaatcccagcaaaatgccggaagccatggtgacgcgtttaacgccaaaacgttcctgtaatttgcccgcaacagaagagctaattgccagccccagacttaacaagccgaaagagaaagcgacctggcttaccggcgcatccagcttggcggaaagcgcgccattaaacaggctccaggtataaacgctccccagcgcaaactgggtaatgatagtaccgatgagtgtcagccagcgggtacgctgataattactaggtgtcatggcagtattcctgcagtaataaaaaggaaaaatctctgccgacaaccataacgaagtgcactttatgcctggggaaaaacggcatgaaatgccatcagaacggaatgaaatgccttagttcaggaatgaatgacgcgacaattattcaccaaatttattatttggtaagttagcacccactatcgccacaactattgttatttaatggtttcaattgtgactgttacgttaaaatctggcgctaacccccatcgtatacagatagtcgctattattagtggtattttctgcctgagttagcgcggcataggcggcaatattttgattgagcaacatatcagcgcctacggtgacatccagccagttgccgttctggtttgtcgccgtcatccggctcaggccactttgcgccttccagatattctcgccaaattgctggttatagctgatttgcgcccagggtcggagatcgccaagccgggagtcaacacgccagcctaaggtactcacgctggcatgccataacggatcggtcagcgtggtagtactgtcgccaaactcgttatacatgctggtggttgtgccatcgtaatgtaatgccgcgaccgggccggttgtaacctgttcatataaaggaaaattccagcccatactcatactgctggtcacatccacaggggtttcttccgccagattgacttccagtcccagcgccctttggctactttgaatacgttggctcaaaatatcgttgtaatcaggttgatgatcactatcccaggtgtaacgctctgtggaaagtccgggttgcgtatcaacgatatattcttgttgccaggcgtaagctgtgttgagaaaaaaggcactgattaccacgctcgccagcaggcttagctgccagcgaccaccgcttttttttatgatcattaacacgactccagggaagagccgaattcggcaatattattgtcattgtatgaaggatatcgggcatagtagccctgtattaaatattgactttttcaccgatgcgtcaagaaaagcggctgaaatttttacgatcgggtacatagcgagggaaagtatggaacgttgcggctgggtgagtcaggacccgctttatattgcctaccatgataatgagtggggcgtgcctgaaactgacagtaaaaaactgttcgaaatgatctgccttgaagggcagcaggctggattaagctggatcaccgtcctcaaaaaacgcgaaaactatcgcgcctgctttcatcagttcgatccggtgaaggtcgcagcaatgcaggaagaggatgtcgaaagactggtacaggacgccgggattatccgccatcgagggaaaattcaggcaattattggtaatgcgcgggcgtacctgcaaatggaacagaacggcgaaccgtttgtcgactttgtctggagctttgtaaatcatcagccacaggtgacacaagccacaacgttgagcgaaattcccacatctacgtccgcctccgacgccctatctaaggcactgaaaaaacgtggttttaagtttgtcggcaccacaatctgttactcctttatgcaggcatgtgggctggtgaatgatcatgtggttggctgctgttgctatccgggaaataaaccatgattcgggaagcgcaacgtagtgaactccccgcgatcctcgaactgtggctggaaagtacaacctgggggcatccctttataaaagcgaattactggcgtgactgcattccgctggtgcgggatgcctatcttgccaacgcgcaaaactgggtctgggaagaagacggtaagcttctcggttttgtcagcattatggaaggccgatttctggcagcgatgtttgtcgcaccgaaggccgtcaggcgcggtattggtaaggcgctgatgcagtatgtgcagcagcgccatccccacctgatgctggaggtttatcaaaaaaatcaaccggcgataaatttttaccaggcacagggttttcacattgtcgattgcgcatggcaggatgaaacccaactacccacatggattatgagctggccggtggttcaaacgctgtaattaactgctggccggtggttcaaacgctgtaagtgtcagttccggaccgttgtatttttccagccatgccagcgccgtattacccgcacagccattccccagccggctgctggggagatctttggtcagcacgttcactgcgccgtttttacaaataccgtcagcggttaaatccagatccggccatgccccttcgtgaatgcaaatcacgccaggtttaattccctcgctaatgaccgctccggcaagaatttgcccgcgtgcgttccacaaccgaacagtatcgccatcttgtatgccgcgctcctgggcatcgtcaggatgaatggtgacaggctcacgatttgccaccgcgtacaattcgcgcagagaactgtaattcagctggctgtgcaggcggtgcgccggatgggcagaaagtacctgcaactgttctggttcggcattgccctgccattcgtccggctccagccacattggatgcccagggcaatccgggtaaccgtaatcggcaatacgctgactgaagatttcaatcttgccgctggcggtttttaacggatgcgccagcggatcgcggcaaaaatcagcgaagcgaataaaccgctcgctgtccgggttttccggcatctcaattaactggttggcttgccagaactcagcaaatggcggcaattcaacctgctggcttgccccgcgctgtcgggcaacgttataaaacgtttccagccattgcagctcactttttccttccgtaaaacgtgcataaccgcccttctcccagcgttcacttaactcggcaaaaacatcaaaatcattacgcgcttcatagcgtggcggcaccacttgcttcatcggcaccagatgctgattactgtaatcaccggtcatggtgagatcattacgctcaaaagaggtagtcgcaggcagaacgatatccgcgtgttttgccgccgccgtccagaagcattcagagatcaccaccagctccggtttttgccaggcacggatcaggcgattggtatcctgatgatgagtaaagttggcaccgcccgcccaccagataaaacgaatatccgggaaatgtcggttcataccgttgtgttgatatgcgccaccagggttttccagtgcttcaacaatgcgggcaacagggattttatccaccgcatcgcagccacccggcaagctgccctgcatggaagagagcaccgcagaacgccgcgtggggttaccaccattggcaaaatggtaagaaagaccaaaaccgccgccgggtgtgccgatttgccccaacattgctgccagcgtgacgatcatccagtgtttttgctcaccaaactgttggcgctgcattccccagcctgccatcagcatggtggtattttggtggaaaatagccgccagctcgcggattttcgctgcgccaacaccacaaatctctgctgcccattcggcggttttcgctattccgtcactctcgcccagcaaataagaggcgaagacggcataacctgtggtgcaacgcgccagaaacgcttcgtcgtgccaaccattttccaccagcgtatgggcgatccccagcatcagcgcaacatcggtgcccatgtgcggtgccacccactccattttatcgccaaagaaatcgacggtttcgcttcgcattggatcaatgcagatcagctttttcccgctgtcacgcagtgcagaaaagtaagaaagcccctgctcatcggatgcattccacgcaattttcagcgtattgagtgggttagcactccacagcaccacgacatcgctatgttccagcaccagcggccaactggtctgctgttgataaacttcactaccacccacgacatacggcatgatcgcctgtgccgcgccggtgctataatcccccagatgcccggtataaccgcctgccagcgccatatagcgttgtaataatgtgctggccttatgcagcacgccgttactacgccagccgtaggaaccagcaaaaatgcttgccggaccataagcctcacgaatgcgtttatgttgttggtgaataagatccagcgcctcatcccaactcacgcgaacaaattcatcctgcccacgaatgccttgcgggttttccggactcgcaagaaagccttttcgcaccattggaaatcgtacccgcgtattgctgtgaacctggtcgcgaaccgcgctctgcaaggagttttccattcctgtggctaacgcgccacggctgctaaacacggtttcgccgtcggtttcaaccagcatgggcccccaatgggcggcagtcagaacggaatatcgtgaggatgagttggccaaaccgaagactcctgaaaggttagatgtattgagcagttaaatattacttacaaatttccgagtattcccaggaataatcttcatgttcacgcggcataatctcccgccacggaacccgtggcaaagaataaaaaggttattaaggattaacaatgaagaaacgtgtttatcttattgccgccgtagtgagtggcgctctggcggtatctggctgcacaactaacccttacaccggcgaacgcgaagcaggtaaatctgctatcggcgcaggtctgggctctctcgtgggcgcgggtattggtgcgctctcttctagcaagaaagatcgcggtaaaggcgcgctgattggcgcagcagcaggcgcagctctgggcggcggcgttggttattacatggatgtgcaggaagcgaagctgcgcgacaaaatgcgcggcactggtgttagcgtaacccgcagcggggataacattatcctcaatatgccgaacaatgtgaccttcgacagcagcagcgcgaccctgaaaccggcgggcgctaacaccctgaccggcgtggcaatggtactgaaagagtatccgaaaacggcggttaacgtgattggttataccgacagcacgggtggtcacgacctgaacatgcgtctctcccagcaacgtgcggattccgttgccagcgcgttgatcacccagggcgtggacgccagccgcatccgtactcagggccttggcccggctaacccaatcgccagcaacagcaccgcagaaggtaaggcgcaaaaccgccgtgtagaaattaccttaagcccgctgtaatccctttcatgccaggtgatgcagaaatcacctggcattcttcagttttccttcatcatatttcaggctaaggtgatcgccttatcagtgaatggagagaagcatgaagccgtccgttatcctctacaaagccttacctgatgatttactgcaacgcctgcaagagcatttcaccgttcaccaggtggcaaacctcagcccacaaaccgtcgaacaaaatgcagcaatttttgccgaagctgaaggtttactgggtagtaacgagaatgtaaatgccgcattgctggaaaaaatgccgaaactgcgtgccacaagtacgatctccgtcggctatgacaattttgatgtcgatgcgcttaccgcccgaaaaattctgctgatgcacacgccaaccgtattaacagaaaccgtcgccgatacgctgatggcgctggtgttgtctaccgctcgtcgggttgtggaggtagcagaacgggtaaaagcaggcgaatggaccgcgagcataggcccggactggtacggcactgacgttcaccataaaacactgggcattgtcgggatgggacggatcggcatggcgctggcacaacgtgcgcactttggcttcaacatgcccatcctctataacgcgcgccgccaccataaagaagcagaagaacgcttcaacgcccgctactgcgatttggatactctgttacaagagagtgatttcgtttgcctgatcctgccgttaactgatgagacgcatcatctgtttggcgcagaacaattcgccaaaatgaaatcctccgccattttcattaatgccggatgtggcccggtggttgacgaaaatgcactgatcgcagcattgcagaaaggcgaaattcacgctgccgggctggatgtcttcgaacaagagccactgtccgtagatagcccgttgctcagtatggccaacgtcgtcgcagtaccgcatattggatctgccacccatgagacgcgttatggcatggccgcctgtgccgtggataatttgattgatgcgttacaaggaaaggttgagaagaactgtgtgaatccgcacgtcgcggactaagccgcgactgcgtagagtaaagcccgataatcgctcgggcttttactctttattgggttgcagtaactgctgtagtccaggcctgattaaacgcctgatgctgtgccggtaatggcgcaatcagtttgttatattcacttgcctgctgactagtcgggaactggatgccatttgcgacaaagctcacctgagtaccttgctgagcaatgtagtctccaaccatcaccagttgttgcgtgaaagtttgtgccgccggaatcaacggttgcaatgcatcagctggcgtcgttaccactttggtgaatgcctgatcaaagaccggtttcaaatcatcgctctgttttagcgcagagtgcgcagcatcggcctgcaacttcgcattttgcagttgttgcgccagcacacccaggctaccgttcatttcacgcagcggaccgctttgcgtaacgtaatcctgcggtacgcgaattgcgttaacgctgtctacaaccgggcgcagaccggaatccatcgcctgattcacctgctgagaataaccatacagaatcgcgtaatcagagacaaaaggaccaaactgttttttctgatcggcagtcagggttggtagacgttcaccgctacgcatcactgtattctgcaggaagtcgataaacgctttacgctgatcgccttctttatcaaaacacccactcaggctaactaccattaataacgccgcaagaggcgcaaaccagcgagagcaggactttcctgtcgccattttcttactcctttcacccaaaaaaagcgcacaacgacacacgcgtgtctgacgtgacaaggatagtccaggacaggcttgcaggataccctttctacgtaatcttcctggtaaaatcatggagaaaatgaaacaaggttaatttgttgtttcattgttaaaaaatgatagtgccgttgccttttttgtagccagagatttacgccttcgcagaaggttagattttcgaaatctttacaaaacaggagtggtaagagatatatcggcatttatcagatcgttaggtggctataagtcacgctaaatgacaggctgaatcgaatcatagccagagcatgccctgacttcaccccgctgtgtctgcttttcccgactattcttaatgagcttcgatgcaattcacgatcccgcagtgtgatttgaggagttttcaatggaatataaagatccaatgcatgagctgttgagcagcctggaacagattgtttttaaagatgaaacgcagaaaattaccctgacgcacagaacaacgtcctgtaccgaaattgagcagttacgaaaagggacaggattaaaaatcgatgatttcgcccgggttttgggcgtaagtgtcgccatggtaaaggaatgggaatccagacgcgtgaagcctagtagtgccgaactaaaattgatgcgtttgattcaagccaacccggcattaagtaagcagttgatggaataaacttttatccactttattgctgtttacggtcctgatgacaggaccgttttccaaccgattaatcataaatatgaaaaataattgttgcatcacccgccaatgcgtggcttaatgcacatcaacggtttgacgtacagaccattaaagcagtgtagtaaggcaagtcccttcaagagttatcgttgatacccctcgtagtgcacattcctttaacgcttcaaaatctgtaaagcacgccatatcgccgaaaggcacacttaattattaaaggtaatacactatgtccggtaaaatgactggtatcgtaaaatggttcaacgctgacaaaggcttcggcttcatcactcctgacgatggctctaaagatgtgttcgtacacttctctgctatccagaacgatggttacaaatctctggacgaaggtcagaaagtgtccttcaccatcgaaagcggcgctaaaggcccggcagctggtaacgtaaccagcctgtaatctctgcttaaaagcacagaatctaagatccctgccatttggcggggatttttttatttgttttcaggaaataaataatcgatcgcgtaataaaatctattattatttttgtgaagaataaatttgggtgcaatgagaatgcgcaacgccgtaagtaaggcgggaataatttcccgccgaagactcttactctttcaatttgcaggctaaaaacgccgccagctcataactctcctgtttaatatgcaattcacacagtgaatctcttatcatccgggtgaaaaataaaagcgtgaaacaaatcactattaaagaaagtaatctatatttctgcgcattcccagcctcctgtgttgatttccaacgagtataactttgatttatagtcaggtggggcttttctctgtctgcctttcggtgaatacctgagacaaacagtctcaagcacccgtggctattctagcttaataagtttgtttcttctccttgatataatcctaaaaaaatctcataaaattaatatatgagataatctttattcagcagaagattattaaaggttgctgtattatttagcgataaaaaaagcctgccagatggcaggctatttaataacggcgttattattgcaacaggctaatatccgcaacgcgcaggaacagttcgcgcagtttctccagcatggtcagacggttgatacgcaattctttgtcatcaaccatgaccatcactttatcgaagaaagcatcaaccggttcacgcagctcagccagttcgaccagcgcatcctggtaacgaccttccgtaaagtacggctccagcttgtcacgtagcaccacaacctgcatcgccagtttaatttcttccggctctttcagggtagaggcattcacgcggtcgctcagcacttcgtcagatttcgccagaatgttagatacacgtttgttcgccgccgccagtgcagcagctgcatccagggtacggaaatggcttaccgctttcatacgggcatcgaaatcagccggacgagtcggacgacgcgccagtaccgcctggatggtgtcaacggtataaccttcgtcctgataccaggcgcggaagcgaccgagcataaagtcgataacatcatcaactacgttggcattagtcagcttatcgccatacagacgcaccgcttcttcggtcagcgtttgcagatcaaggttgaggttcttctcaacgataattcgcagcacgccaagcgcggcacgacgcagcgcaaacgggtctttgtcgcctttcggatgctgaccgataccgaagatacccgccagggtatccatcttgtcagcaatcgccagcgcacaagctactgggttggacggcaggtcatcaccagcaaaacgcggctgatactgctcattcagcgccaccgcgacatcttccgcttcgccatcgtgacgcgcatagtgcatccccataacgccctgggtgtcggtgaactcgaagaccatgttggtcatcaggtcgcacttagacagcagacccgcacgggtagcgtggttaacgtcagcgccaatctgttcagcaatccagccagccagcgcctggatgcggtcagttttgtcgcgcagcgtccccaactgttgctggaacaacacggtttgcaggcgcggcaggttatcttcaagacgttttttacggtcggtgttgaagaagaactcggcatccgccagacgcggacgaacgactttctcgttaccggagataatctgctgcggatctttgctttcgatgttggcaacgaagataaagttcggcagcagtttgccgtcgttcgcatacaccgggaagtatttctggtcacctttcatggtgtaaaccagcgcttcagccggcaccgcgaggaatttctcttcgaattttgcggtcagaacgaccggccactccaccaggctagccacttcttccagcaggctttcgcttaagtcagcgttaccgccaatcttacgcgctgcttcttcggcatcggctttaatcttcgccttacgttcttcgtaatcggcgatgactttcccacgctcacgcagaatttccggatactgatcggcgttatcgatggtgaattccggctcgcccataaagcggtggccgcgaatcacgcgatcggactgaatgcccagaatggttgccggaatgactttgtcgcccagcagcagggtcacggtgtgcaccggacgcacgaagtgcacgtcgcttgcgccccaacgcatcagtttcgggatcggcagtttcgccagagaagtcgcaaccatattcggcagcagtgcttcggtgctttcgcccttcacatgggcgcgatacagcagccattcgcctttatcggtagtcagacgctcagcctggtcaacggtaataccgcaaccacgcgcccaaccttctgccgctttgctcggtttgccttcagcgtcgaacgcctgggcaatcgccgggccgcgtttttcgatttcacgatccggttgcgcttccgccaggttagctactttcagcgccagacgacgcggagcagcaaaccattgaacggtgccgtgtgcgaggccagcgctatccagctccgcagtaaagttcgcagcaaaggactcagccaggctgcgcagtgcttttggtggcagctcttcagtgccgatttccaccagaaaagttttctcagacatagccgcctcttacttatctttgttgcacatcgggaagccgagggcttcacgggaagcgtagtatgcttctgccactgctttggtcagggtgcgaatgcgcagaatgtagcgctgacgctcggtgacggagatggctttacgcgcatccagcaggttgaagctgtgggcggctttcagaatacgctcgtaggctggcagcggcagcggattttccagcgccagcagctgctgcgcttctttctcgtactgctcgaagcaggtgaacaggaagtccacatccgcgtattcgaagttgtaagtggactgctccacttcgttctgatggaacacgtcgccgtaggtggttttacccagcgggccgtcgctccagaccaggtcgtaaacgctgtctacgccctgaatgtacatggccagacgttccagaccgtaggtgatctcgccggtaaccggtttacactccagaccaccaacctgctggaagtaagtgaactgcgtcacttccatgccgttcagccacacttcccagcccagtccccaggcacccagcgtcgggttttcccagttatcttccacgaaacggatgtcgtgaatagtcgggtccatgcccagctctttcagagaaccgaggtacagctcctgaatattgtccgggcttggcttaatgaccacctggaactgatagtagtgctgtaaacggttggggttttcgccgtagcgaccatcggtcgggcgacgagaaggctgaacataagcagccgccatcggttctggccccagctcgcgcagacaggtcattgggtgagaggttcccgcgccgacttccatgtccaatggttgaacaatggtgcagccctggcgagcccagtaatcctgtaaggtcaggaacaagccctggaaggtcctggtatcaaacttttgcatattatttcgtgctggatacgtgtggatttaaaggaagggatcagtatacccgctggatggaagatatacagtacgaaacgggaaaaagcagggcttaacgcatggaaagatgcaaaaaatggccatccgcgtcaaaagaacagacaaactgctctttacggaaggtataaccgcgcatttcatagcttccctggaactgttcgaaggcggtgacgtcgattttttgctcgccggtgttataacgttttgccgcctgatccttgcataacgcttccatattcaagctacgcagaggatcaacctttacccgttgtgctttctgcacgggactcggtatagaacaacccactagcaccataagcgccattgccggaaagaaagcgttcatcatcattaaattaccgtctggtttgcaggtgagtcttattatttatatcggtatagtggctgatatcttacgaatttccttaagcctctataagctgtagtgataaaactcagattattccagtgcgccaaccaaatgatttatcggtcagactttttttaaccagatacagagacacagatgcagcccaaaatttactggattgataacctgcgagggatagcgtgtttaatggtggtgatgattcacaccactacctggtatgtgaccaatgctcatagtgttagccccgtcacatgggatatcgccaatgttctgaattctgcctctcgtgtcagcgtgccgctatttttcatgatttccggctatctcttttttggcgaacgcagcgcccagccgcgccatttcttgcgtatcggcttatgtctgattttttatagcgcaatcgcactgctctacattgcgctgtttacctccatcaatatggagttagcgctgaaaaacctgctgcaaaagccagtgttttaccacttgtggtttttcttcgcgattgcggtgatttatctggttagtccgctgattcaggtgaagaacgtcggcggaaaaatgttgctggtgctaatggcggtgattggcattatcgctaacccaaacacagtgccgcagaaaattgacggttttgaatggctgccaattaacttatatatcaatggcgatactttttactacattctgtatggcatgttgggccgcgctatagggatgatggacacacagcataaagcactgagctgggtgagcgccgcgctgtttgcgacgggggtttttattatctctcgcgggacattatatgaattgcagtggcgcggaaattttgccgatacctggtatctttactgtgggccgatggtttttatctgcgcaatcgcgctattgactctggttaaaaacacgctggatacgcgtaccattcgcggacttggcttaatctcccgccatagtttgggtatatacggattccacgccttgattatccatgcgctgcgcacccggggaattgagcttaaaaattggccaatactggatattatttggatcttttgcgcgacgttggcagcgagtttgttactttctatgctggtacaacgaatcgacagaaacagattagtgagttaagtaaaagcccggtcacattggactgaccgggcttacgtgagttattcgctgtattcttcctgggtaacctgtgtttcttttggtgggtttattccggcatcacgaatatttttctgcaccgctactgcaccaaacaagcttaagaagaaagccagtccataaaaacctttttcgctgagtaataatgtcgcattccacagacctaccatcagtaatgcaacagagataataaagacagtcaggcaggtcatataataaatggaagtggtcggtatgccttcatacttgtcccgaacggtcttttgataagacgccgcagaaaacagtcctaataccagtacggcaaaataatatcctttttcatttaactgcatctctgcattccatagccctaacagataggtaacgataccaccaacgagagctatccaactcacaatactaaaggccggactataggtacttattttgttgtccatcacagtattcctttcattcctgaatatgtaagagctttatgttgctcatgcgctgcgaaacaaacgcatttgaccaaacaagcagacaaaaaaggcgatgggatagatcaccatttcataagtattgataggtgcgtttaaaacaccgataaacaagagaccgatagtgattaacgcaactaactggcagatatgggtaaaaaaatcatccagttgcccgagtttttctgcgcgaagatatgcatagttgccaaaagttgctgtcattaacacgccaagaaaatagccttttccacttaacaatgggcaactgatccatagcccaaccagataaaccagcgccccgacaacaaataatagtttcgccacagtcttactggttttcataacgatctccatatctaccagcgatacattacgagtaaccaacgaaagacaaaactgaaaaatgccattaacaaatgattttcagaataaattcatactaaatattaattaattactgagatatatagatgtgaattatcccccacccggtcaggcaggggataacgtttacgccattaatggcagaagttgctgatagaggcgacggaacgtttctcgtcgtggctgataagcggcataacgctgcgcatctggtagatggctctgttctaacggtagttgcggcaacaattcaatgaggcttttctctggattcgccgcgatctgcgccagccttgctgcgcccagtgctggccccacatccccccccgtacggtaatcgagctgctgaccgctgatatccgccagcatctgacgccagtactcactacgcgccccgcccccaatcaacgtaacactttgcggtttaataccgcaggcatgcacgacatccatgccatctgccagcgcataacccacgccttccagcactgctcgcgccagttcattggggccatgttgatgagtcaaaccaaagaaaacccccttcgcctggggattattgtgtggcgtacgctcgccggaaagataaggcagaaaccaaactggctcggcactttcatcagcctgttgagctgcagcgattaaagctgggacattgctcaggccggttaatttcgcggcccaatccagacagctcgctgcactcagcatcacagacattaaatgccaacgttgcggtagcgcatggcaaaagctatgtacggcgctttctggcttgcttaagaacccttcgctgacagcaaaatagaccccgctcgtccccaggcttaacattgcctgattagcatcaaccattcccacaccaactgcaccagctgcattgtcgccaccgcctgcgacaactggcaccgtcgccataccccacgctttcgcaacttcaggtaacaaagcaccagtaatttcgctgccttcgtataatgcgggcatctggtcacgagataagtcgcaagcctgcagcatgacgtcactccagtcacgctttgcgacatccagccacatggtgccagctgcgtcagacatatcgctggcaaactcccccgtcatacgcagacgcaagtaatctttcggtaataatactttgtcgatttgacggaatatctccggctcatgccgctgaacccatagcaatttaggcgcagtaaatccgggcatcatcaggttgccggtaatcacccggctttgcggaactcgcgcttccagcaaagtgcactcttgcgcacagcgcccgtcgttccacaaaatggcagggcgtaacacccgttgctgagcatccagcaaggttgctccgtgcatctggccggcaatacccaatgctttaacgtcctgcagagaatgctgatcgcccagagctttcattgcgcgatcagttgcctgccaccactgttccgggtcttgttcgctccagagtggatgcgggcggctaacggtcagcttttccgtttgcgcagcaaccacctcaccctgctcgttgagcaaaataacttttacgccgctggtgccaagatctatcccgatatacatatcgatcgttccttaaaaaaatgcccggtatcgctaccgataaccgggccaacggactgcacagttagccgttatttgtcgaacagataatggtttaccagattttccagttgttcctggcgaccactctgatgcaccggagacaaatgatgttcctgagcatatttggctaaatctgccagactcatttggcctttcaggatttgctggcccaattcgctattccagccggaataacgctgcgcgatgcgtttatccagctcgccatcttcaatcatgcgcgctgcaattttcagcgccagtgccatcgtatccatcgcgccgatatgaccgtaaaacagatcatatttatcagtactttgacgacgtactttggcatcgaagttcagaccaccggtggtgaaaccgcctgctttgagaatttcatacatcaccagcgcattctcttccacactgttcgggaactggtcggtgtcccagcccagttgcgcatcgccacggttggcgtcgacagaaccgaacaggccaagcgcaatggcggtggctatttcatgatggaaagagtgacctgccagcgtcgcgtggttagcttcaatgttcagtttaatctctttttccagaccaaactgtttcaggaagccatagaccgtcgcggcatcgtaatcatattgatgtttggtcggttcttgcggtttcggttcgataagcaacgtgccctggaaaccgattttatgtttatgctcaaccaccatctgcataaagcggcccagttgttcacgctcctgacgcaagtcggtatttaacagcgtttcgtaaccttcacgaccgccccacaggacatagttttcaccgcccaatttatgggttgcttccatcgctgtaacaacttgcgttgccgcccagctgaagacttcaggatctgggttcgtcgccgcacccgcgccgtagcgagggtttgtaaagcagttggccgttccccacagcagcttcacgccgctctcttcttgcttgcctgccaggacatcaaccatttgcgcaaaattattgatgtactcttttaagctcgcgccctcaggggaaacatccacatcgtggaagcaataaaatggcacatgtaacttgtggaaaaactcaaatgcgacatctgctttacgcttcgccaacgccagtgcctcaccaggctgctgccacggacgattaaacgcccccacaccaaacatatccgccccgttccagcagaaggtgtgccagtagcaggcggcaaaacgcaagtgctcttccatacgcttacccaacaccagttcgtcgggattgtagtgacggaatgctaacgggttactggatttactgccttcataacgaacgcgatcgagctggtcaaaataggcttgcatattgaactccataatcaggtaatgccgcgggtgatggatgatgtcgtaatattgggcactccctttcagttgctcaattatgttatttcacactgctattgagataattcacaagtgtgcgctcgctcgcaaaataaaatggaatgatgaaactgggtaattcctcgaagagaaaaatgcaataagtacaattgcgcaacaaaagtaagatctcggtcataaatcaagaaataaaccaaaaatcgtaatcgaaagataaaaatctgtaattgttttcccctgtttagttgctaaaaattggttacgtttatcgcggtgattgttacttattaaaactgtcctctaactacagaaggccctacaccatgaaaataaagaacattctactcaccctttgcaccagtctcctgcttaccaacgttgctgcacacgccaaagaagtcaaaataggtatggcgattgatgatctccgtcttgaacgctggcaaaaagatcgagatatctttgtgaaaaaggcagaatctctcggcgcgaaagtatttgtacagtctgcaaatggcaatgaagaaacacaaatgagccagattgaaaacatgataaaccggggtgtcgatgttcttgtcattattccgtataacggtcaggtattaagtagcgttgtaaaagaagccaaacaagaaggcattaaagtattagcttacgaccgtatgattaacgatgcggatatcgatttttatatttctttcgataacgaaaaagtcggtgaactgcaggcaaaagccctggtcgatattgttccgcaaggtaattacttcctgatgggcggcagcccggtagataacaacgccaagctgttccgcgccggacaaatgaaagtgttaaaaccttacgttgattccggaaaaattaaagtcgttggtgaccaatgggttgatggctggttaccggaaaacgcattgaaaattatggaaaacgcgctaaccgccaataataacaaaattgatgctgtagttgccagtaacgatgccaccgcaggtggggcaattcaggcattaagcgcgcaaggtttaagtgggaaagtagcaatctccggccaggatgcggatctcgcaggtattaaacgtattgctgccggtacgcaaactatgacggtgtataaacctattacgttgttggcaaatactgccgcagaaattgccgttgagttgggcaatggtcaggaaccaaaagcagataccacactgaataatggcctgaaagatgtcccctcccgcctcctgacaccgatcgatgtgaataaaaacaacatcaaagatacggtaattaaagacggattccacaaagagagcgagctgtaagcgttacgccccagcgcggagcgggggcgtgatttctctccatgccgcgtgaatgaattggcttaggtggagtcgttatgccttatctacttgaaatgaagaacattaccaaaaccttcggcagtgtgaaggcgattgataacgtctgcttgcggttgaatgctggcgaaatcgtcagtctttgtggggaaaatgggtctggtaaaagtacgctgatgaaagtgctgtgtggtatttatccccatggctcctacgaaggcgaaattatttttgcgggagaagagattcaggcgagtcacatccgcgataccgaacgcaaaggtatcgccatcattcatcaggaattggccctggtgaaagaattgaccgtgctggaaaatatcttcctgggtaacgaaataacccacaatggcattatggattatgacctgatgacgctacgctgtcagaagctgctcgcacaggtcagtttatccattagtcctgatacccgcgttggcgatttagggcttgggcaacaacaactggttgaaattgccaaggcacttaataaacaggtgcgcttgttaattctcgatgaaccgacagccagtttaactgagcaggaaacgagcattttactggatattattcgcgatctacaacagcacggtatcgcctgtatttatattagccacaaactcaacgaagtcaaagcgatttccgatacgatttgcgttattcgcgacggacagcacattggtacgcgtgatgctgccggaatgagtgaagacgatattatcaccatgatggtcgggcgagagttaaccgcgctttaccctaatgaaccacataccaccggagatgaaatattacgtattgaacatctgacggcatggcatccggttaatcgtcatattaaacgagttaatgatgtcagcttttccctgaaacgtggcgaaatattgggtattgccggactcgttggtgccggacgtaccgagaccattcagtgcctgtttggtgtgtggcccggacaatgggaaggaaaaatttatattgatggcaaacaggtagatattcgtaactgtcagcaagccatcgcccaggggattgcgatggtccccgaagacagaaagcgcgacggcatcgttccggtaatggcggttggtaaaaatattaccctcgccgcactcaataaatttaccggtggcattagccagcttgatgacgcggcagagcaaaaatgtattctggaaagtatccagcaactcaaagttaaaacgagctcccccgaccttgctattggacgtttgagcggcggcaatcagcaaaaagcgatcctcgctcgctgtctgttacttaacccgcgcattctcattcttgatgaacccaccaggggtatcgatattggcgcgaaatacgagatctacaaattaattaaccaactcgtccagcagggtattgccgttattgtcatctcttccgaattacctgaagtgctcggccttagcgatcgtgtactggtgatgcatgaagggaaactaaaagccaacctgataaatcataacctgactcaggagcaggtgatggaagccgcattgaggagcgaacatcatgtcgaaaagcaatccgtctgaataacgcattgaggagcgaacatcatgagcaaaagcaatccgtctgaagtgaaattggccgtaccgacatccggtggcttctccgggctgaaaagtctgaatttgcaggtcttcgtgatgattgcagctatcatcgcaatcatgctgttctttacctggaccaccgatggtgcctacttaagcgcccgtaacgtctccaacctgttacgccagaccgcgattaccggcatcctcgcggtaggaatggtgttcgtcataatttctgctgaaatcgacctttccgtcggcagtatgatggggctgttaggtggcgtcgcggcgatttgtgacgtctggttaggctggcctttgccacttaccatcattgtgacgctggttctgggactgcttctcggtgcctggaacggatggtgggtcgcgtaccgtaaagtccctagttttattgtcaccctcgcgggcatgttggcatttcgcggcatactcattggcatcaccaacggcacgactgtatcccccaccagcgccgcgatgagtcaaattgggcaaagctatctccccgccagtaccggcttcatcattggcgcgcttggcttaatggcttttgttggttggcaatggcgcggaagaatgcgccgtcaggctttgggtttacagtctccggcctctaccgcagtagtcggtcgccaggctttaaccgctatcatcgtattaggcgcaatctggctgttgaatgattaccgtggcgttcccactcctgttctgctgctgacgttgctgttactcggcggaatgtttatggcaacgcggacggcatttggacgacgcatttatgccatcggcggcaatctggaagcagcacgtctctccgggattaacgttgaacgcaccaaacttgccgtgttcgcgattaacggattaatggtagccatcgccggattaatccttagttctcgacttggcgctggtagtccttctgcgggaaatatcgccgaactggacgcaattgcagcatgcgtgattggcggcaccagcctggctggcggtgtgggaagcgttgccggagcagtaatgggggcatttatcatggctagtctggataacggcatgagtatgatggatgtaccgaccttctggcagtatatcgttaaaggtgcgattctgttgctggcagtatggatggactccgcaaccaaacgccgttcttgattttgataaaaattttctcaaagccggttacgtattaccggttttgagtttttgcatgattcagcaggaaaagaaccatgtttactaaacgtcaccgcatcacattactgttcaatgccaataaagcctatgaccggcaggtagtagaaggcgtaggggaatatttacaggcgagtcaaagcgaatgggatattttcattgaagaagatttccgcgcccgcattgataaaatcaaggactggttaggagatggcgtcattgccgacttcgacgacaaacagatcgagcaagcgctggctgatgtcgacgtccccattgttggggttggcggcagctatcaccttgcagaaagttacccacccgttcattacattgccaccgataactatgcgctggttgaaagcgcatttttgcatttaaaagagaaaggcgttaaccgctttgctttttatggtcttccggaaagtagcggcaaacgttgggccactgagcgcgaatatgcatttcgtcagcttgtcgccgaagaaaagtatcgcggagtggtttatcaggggttagaaaccgcgccagagaactggcaacacgcgcaaaatcggctggcagactggctacaaacgctaccaccgcaaaccgggattattgccgttactgacgcccgagcgcggcatattctgcaagtatgtgaacatctacatattcccgtaccggaaaaattatgcgtgattggcatcgataacgaagaactgacccgctatctgagccgtgtcgccctttctagcgtcgctcagggcgcgcggcaaatgggctatcaggcggcaaaactgttgcatcgattattagataaagaagaaatgccgctacagcgaattttggtcccaccagttcgcgtcattgaacggcgcagtacagattatcgcagcctgaccgatcccgccgttattcaggccatgcattacattcgtaatcacgcctgtaaagggattaaagtggatcaggtactggatgcggtcgggatcagccgctccaatcttgagaagcgttttaaagaagaggtgggtgaaaccatccatgccatgattcatgccgagaagctggagaaagcgcgcagtctgctgattagtaccaccttgagcatcaatgagataagccaaatgtgcggttatccaagcctgcaatatttctactctgtttttaaaaaagcatatgacacgacgccaaaagagtatcgcgatgtaaatagcgaggtcatgttgtaacgatgatgagaattgtcggcgtcacatcaggtaacgctgcgtggttgtcggatgcggcgtgaacgccttatccgacctacccgccaggcatgataaaacgcaccaacaacgcttcaggctcgtagctcaactgcctgagacaaagtaaaaagccttatccgactgacaagtcggataaggctcaaggaaatgcaattacatatgcgccgcgattaaccgttggttatcctggtacattgcgaacaggtagttgttataactcttccctttggtgctgtagcccttcagcttgtgaatcatcgctgtggcagtcacttcctgatccgctttacgcagctgcgcacggcttttacggaagctagagtaagccgggtgcgtattcaggttagtgacataggcgctcacgctttctttgacagaactaaactgactgtaccctttcactttacctggcgcattggtacaacgtcctttcatgcatttcatgccgaacaggttgttgttgttgcgcgccagcttgctcgttccccaaccgctttctgctgcagccatcgtcgccaccatactggtggggataatgtctacgcgttcaagcaaggtattccacgggatttttcgcgtattaccggaccacttcaccttgtagcgtttggcgatgtctttcagacgcgcacgctcagcaggactccattggccctgatactgtttactaatgagccagttacgttccgcagtaatggccgcattttggctggtaatgtaaggcattacggtccggagaaacgcctttttccttggtgttccggaagggtattttcgcaaatcaggaagactactactctttgcactattgcgagaatactcttgtttactgcttacctgtttattactagctttagttaagtgggacttttgactcgctgttgttgtgtgcgtcttcgctaacacctcactgctaaacaccagagtgagtaacataagaatcatcgccccatatcgtcgtatgggagtcaaaatcatcaggtctcctggtcggatttaatcattccaacaccttatatttttcacaaatttgagagttgaatctcaaatcatatcaaaaatagctgtcaagagcaccccaaggaatagtccaaatctgaaactatgtcacgtgttaacgattcagattggcgctaaatcgcagaaaatgtgggggttatcgcaaaattcagccgttttttgcgcgagatcgctcacccttgcttctcatcctgtggacttaccgctcagggatgagttttgtttggcttatcgctggcaaactgtctgaaatcgcagcaataaggactcatccgccatgaaactcgccgcctgttttctgacactccttcctggcttcgccgttgccgccagctggacttctccggggtttcccgcctttagcgaacaggggacaggaacatttgtcagccacgcgcagttgcccaaaggtacgcgtccactaacgctaaattttgaccaacagtgctggcagcctgcggatgcgataaaactcaatcagatgctttccctgcaaccttgtagcaacacgccgcctcaatggcgattgttcagggacggcgaatatacgctgcaaatagacacccgctccggtacgccaacattgatgatttccatccagaacgccgccgaaccggtagcaagcctggtccgtgaatgcccgaaatgggatggattaccgctcacagtggatgtcagcgccactttcccggaaggagccgccgtacgggattattacagccagcaaattgcgatagtgaagaacggtcaaataatgttacaacccgctgccaccagcaacggtttactcctgctggaacgggcagaaactgacacatccgcccctttcgactggcataacgccacggtttactttgtgctgacagatcgtttcgaaaacggcgatcccagtaatgaccagagttacggacgtcataaagacggtatggcggaaattggcacttttcacggcggcgatttacgcggcctgaccaacaaactggattacctccagcagttgggcgttaatgctttatggataagcgccccatttgagcaaattcacggctgggtcggcggcggtacaaaaggcgatttcccgcattatgcctaccacggttattacacacaggactggacgaatcttgatgccaatatgggcaacgaagccgatctacggacgctggttgatagcgcacatcagcgcggtattcgtattctctttgatgtcgtgatgaaccacaccggctatgccacgctggcggatatgcaggagtatcagtttggcgcgttatatctttctggtgacgaagtgaaaaaaagcctgggtgaacgctggagcgactggaaacctgccgccgggcaaacctggcatagctttaacgattacattaatttcagcgacaaaacaggctgggataaatggtggggaaaaaactggatcagaacggatatcggcgattacgacaatcctggattcgacgatctcactatgagcctagcctttttgccggatatcaaaaccgaaagtactaccgcttctggtctgccggtgttctataaaaacaaaatggatacccacgccaaagccattgacggctatacgccgcgcgattacttaacccactggttaagtcagtgggtccgcgactatgggattgatggttttcgggtcgataccgccaaacatgttgagttgcccgcctggcagcaactgaaaaccgaagccagcgccgcgcttcgcgaatggaaaaaagctaaccccgacaaagcattagatgacaaacctttctggatgaccggtgaagcctggggccacggcgtgatgcaaagtgactactatcgccacggcttcgatgcgatgatcaatttcgattatcaggagcaggcggcgaaagcagtcgactgtctggcgcagatggatacgacctggcagcaaatggcggagaaattgcagggtttcaacgtgttgagctacctcagcagccatgatacccgcctgttccgtgaagggggcgacaaagcagcagagttattactattagcgccaggcgcggtacaaatcttttatggtgatgaatccagccgtccgttcggtcctacaggttctgatccgctgcaaggtacacgtagcgatatgaactggcaggatgttagcggtaaatctgccgccagcgtcgcgcactggcagaaaatcagccagttccgcgcccgccatcccgcaattggcgcgggcaaacaaacgacacttttgctgaagcagggctacggctttgttcgtgagcatggcgacgataaagtgctggtcgtctgggcagggcaacagtaacttttccggcttcccgttcgtcagtacctcgggaagccgccaaccaggataaaatgtcagccctaatcagcgttgcaggataaagcaccgctcactcttcaacagaccgatttgcaccccagcaaatgtagcgttattgttaccttccttgctacagagttcgacagatatcccgctatgacattctccctttttggtgacaaatttacccgccactccggcattacgctgttgatggaagatctgaacgacggtttacgcacgcctggcgcgattatgctcggcggcggtaatccggcgcagatcccggaaatgcaggactacttccagacgctactgaccgacatgctggaaagtggcaaagcgactgatgcactgtgtaactacgacggtccacaggggaaaacggagctactcacactgcttgccggaatgctgcgcgagaagttgggttgggatatcgaaccacagaatattgcactaacaaacggcagccagagcgcgtttttctacttatttaacctgtttgccggacgccgtgccgatggtcgggtcaaaaaagtgctgttcccgcttgcaccggaatacattggctatgctgacgccggactggaagaagatctgtttgtctctgcgcgtccgaatattgaactgctgccggaaggccagtttaaataccacgtcgattttgagcatctgcatattggcgaagaaaccgggatgatttgcgtctcccggccgacgaatccaacaggcaatgtgattactgacgaagagttgctgaagcttgacgcgctggcgaatcaacacggcattccgctggtgattgataacgcttatggcgtcccgttcccgggtatcatcttcagtgaagcgcgcccgctatggaatccgaatatcgtgctgtgcatgagtctttccaagctgggtctacctggctcccgctgcggcattatcatcgccaatgaaaaaatcatcaccgccatcaccaatatgaacggcattatcagcctggcacctggcggtattggtccggcgatgatgtgtgaaatgattaagcgtaacgatctgctgcgcctgtctgaaacagtcatcaaaccgttttactaccagcgtgttcaggaaactatcgccatcattcgccgctatttaccggaaaatcgctgcctgattcataaaccggaaggagccattttcctctggctatggtttaaggatttgcccattacgaccaagcagctctatcagcgcctgaaagcacgcggcgtgctgatggtgccggggcacaacttcttcccagggctggataaaccgtggccgcatacgcatcaatgtatgcgcatgaactacgtaccagagccggagaaaattgaggcgggggtgaagattctggcggaagagatagaaagagcctgggctgaaagtcactaaaaattgcctgatgcgctacgcttatcaggcctacatgatttctgcaatatattgaatttggaagaatttgtaggccggataaggcgtttacgccgcatctggcataaacaaagcgcactgttccggcgttgagaaacgccggaaaacgtttcaaacaggctgctgccgtagccgatgccgctgcactttctcgacatccatgcactgcaacgcctttgtcgggcaggcttcaacacaggccggtcccgtctcccgatgccagcacagatcgcacttaatcgccctcgcctttttgcggctagaaacgacctccatcgcaccaaacgggcaagccagcatacagcttttacagccaatgcaacgtgtttgttcaacgaaaatatgcccatgttcgcggcttatcgcgtcaacagggcagacattcgcgcacggtgcatcttcacactgatgacaggctactgccgtggtccagcagtggtctttaatgacacgaatacgggaaataaactcgtctggactcaacgcagcgcaatcctgattctcatgatggctcactgcgcaagccacttcacaggtacggcaaccgatacatttcgtcgcatccgcaataataaaccggttcatgatcactcctttgcactaaaacagcagagtgccagagagcgcgtccctactgctttgatccaacgaaggaaatgttaaagttttggcacttgtccaaagcgttatgtgatcgcgcccaggtcatccctgacagtaaatcccagttcattagaaatagcctgcgcggtttcacgcagtggtttcaggagatttttctctcccacctgtttcagacgacttgtgctaaggctaatgctcacggcgtacggcacccgcccatgaatatcaaacaccggaacagcaatacaggagacgccgagttcgttttcttctctgtccatcgccgctccgctttcacgaatgtgcgccagttcgtcgaacatcgcgggcagctcggtaatggtattgcgggttaacggctggatctcatgctgatggctttcccagtaactcttcacgtagtccgggtgaccaaacgccatgtagatcttgcccattgcggaacagtagagcggcatatgctggccaatataggcacgggttcgcagcatcccggttgtgggttccagcttataaatcaaaatagcgtgatcgtcttcgcggctggagaagttaatggtttcaccagtggcgatgttcagtgcctcaagatgcggagcggcgatatgaatgatattcaggctagacagcgccttctgcccgacggcaataaatttggtggtcaggcgataactccctgcggcaggcgcggtggtcacatagccgcaggactgtaatccctgcaataagcgatggacggtactcttatttaaaccagccagctcgctaagatgcgccaacggacaaccgtttggatagttgctcaaaatctcaatcagcatcaacccgcgaaacagactctggcttccggctggacgctctttttcctgcgccatctcgttctctttttttcccatcacttctttccccattttgtcgcgtcctgatggtagcgcaaagtgtgccgtagttcacgatctcgacagataatttataaccaattgatttttatgtcttttgaaattcatcaatcagattgccttgttaaaaagtgatcgatatatttgaaatcaagtttcgcatattgaaattttaagccaaaaaagcgatcaaaaaaacaaggaagcctgggatgaaagtgacatttgagcagttaaaagcagcctttaatcgggtcttaattagtcgcggcgttgacagcgaaacggctgacgcctgtgcagagatgttcgcccgcaccaccgaatccggcgtttattctcacggcgttaatcgtttccctcgtttcattcaacaactggaaaacggcgatatcattcctgatgcccaacccaaacgtataaccagcctcggcgcaattgaacagtgggacgcccagcgtagcatcggtaacctgacagcgaaaaagatgatggatcgcgccattgaactggctgccgatcacggtattggtctggtggcactacgtaatgccaaccactggatgcgcggcggcagctacggctggcaggcggcggaaaaaggctatattggcatttgctggaccaactccatcgccgtaatgccgccgtggggcgcaaaagagtgtcgcataggcactaacccgctgatcgtcgccattccttccacgccgatcaccatggtcgatatgagcatgagcatgttctcttacggcatgttagaagttaaccgtctggcaggtcgtcagctcccggtcgatggtggctttgatgatgagggcaatttgaccaaagaacctggcgttatcgagaagaatcgccgcattttgccgatgggctactggaaaggttctggcatgagcattgtgctggatatgatcgctactctcctttccgacggcgcatccgttgccgaagtcacccaggacaacagcgacgaatacggcattagtcaaatttttattgccattgaagtggacaagcttatcgacggtcccacccgcgatgccaagctgcaacgcatcatggattacgttactagtgccgagcgtgctgacgaaaatcaggccattcgcttacccggccatgaatttactaccctgctggccgaaaaccgccgtaacggcatcactgttgatgacagcgtgtgggccaaaatccaggcgttatgaggagataagtcatgatttttggacatatcgcgcagcccaatccgtgccgtttgcccgccgccattgaaaaggcgctcgattttctgcgcgctaccgatttcaacgccctggagccgggcgttgtcgaaatcgacggcaaaaatatttatacgcaaattatcgatttaaccacacgcgaagcggtggtaaaccgtccggaagtgcatcgtcggtatatcgatattcagtttctggcgtggggcgaagagaaaatcggcattgctattgatacgggaaataataaagtcagcgaaagtctattagagcagcgcaatattattttttatcacgacagtgaacatgaaagttttatagaaatgataccgggcagctacgcaattttctttccgcaggatgttcaccgaccaggttgtattatgcaaacagcctctgagatacgaaaaattgtggttaaagtcgcattaacggcgctgaattaatcgaataatcgtctacgccagaacgcctgggtaatgttattgctctaactatattaataattcaggttgctgcacatgcgacttgaattatgacagacatagcctcaaggaatagctatgaaaaaaatactcgaagcaatactggcgattaatctcgccgtactttcctgtattgtatttataaacattattttaagatatggttttcagacaagcattttatctgttgatgaattgagtcgttatttatttgtctggttaacgtttattggcgcgattgtagcttttatggataacgcccacgttcaggtcacctttctggtggagaaactctcccccgcatggcagcgacgagtcgctctggttacccattccttaatcttatttatttgtggcgcactggcctggggcgcaacgctaaaaacaattcaggactggagcgattatagtccgatcctcggtttacccatcggcctgatgtatgccgcttgtctgcccaccagcctcgttatcgcattctttgaactgcgtcatttatatcaactcatcacgcgtagcaattctctaacgagcccaccgcaaggagcttaatcatggctgtgctgatttttctgggctgtctgttgggtggtattgctatcggtttgcctattgcctgggcactgttgttgtgcggggcggcgttaatgttctggctggacatgtttgatgtccagatcatggcacaaacgctggtgaacggagccgatagcttctccctgctggcgattccgttctttgtgctggcgggtgaaatcatgaatgcgggcggcttgagtaaacgcattgttgacctgccgatgaaactggtggggcataaaccaggcgggctgggctacgtcggcgtgctggcagctatgattatggcgagcctttctggttctgccgttgcggataccgccgccgttgccgctctactggtgccgatgatgcgcagcgccaactatccggtcaaccgggcggcggggctgattgcctctggcggcattatcgcgccaattattcccccttccattccgtttattatcttcggcgtttccagcggattatccatcagtaagctgtttatggcgggcattgcccctggcatgatgatgggcgcaacgctgatgcttacctggtggtggcaggccagtcgccttaatttaccccgccagcaaaaagcaacgatgcaggaaatctggcactcttttgtctccggtatctgggcgctgtttcttccagtcatcattattggcgggtttcgctccggcctgtttacccctaccgaagccggggccgttgctgctttctatgcgctgtttgtcgccacagttatttaccgtgaaatgaccttcgccacactttggcatgtactcattggcgcggcgaaaaccaccagtgtggttatgtttctggtggccagcgcacaagtttccgcctggctgattaccattgctgaactgccgatgatggtttctgatttactgcaaccgttggtcgatagtccgcgtctgctgtttatcgtcattatggtggctatcctgattgtcggcatggtcatggatttaacgccgacggtattaattcttaccccggtattaatgcctttagttaaagaggcaggaatcgatccgatttatttcggtgtcatgtttatcattaactgcagtatcggcttaattacaccgcctatcggtaatgtacttaacgttattagtggggtggcaaaactcaaattcgatgatgcagtcagaggcgttttcccttacgtcctggttttatatagtttattagtcgtatttgtttttattcccgatctcatcatcctccctttgaaatggattaattaaaaggaaaatattatgaaattacgctctgtaacctacgcattattcattgctggcctggctgcattcagcacatcttctctggcggcacaatctttacgtttcggttatgaaacaagtcaaaccgacagccaacatattgcggcgaaaaaattcaatgatttattgcaggagagaaccaaaggcgagctgaaattaaaactgttcccggacagcactctcggtaacgcgcaggcgatgatcagcggcgtacgtggcggcaccatcgatatggaaatgtccggcagcaataactttgccgggttaagtccagtgatgaacttgcttgatgtccctttcctgttccgcgataccgctcacgcgcataaaacgctcgacggcaaagtcggtgatgatctgaaagccagtcttgaaggtaaaggactgaaagtactggcctactgggaaaacggctggcgcgatgtcaccaacagccgcgcaccggttaaaacccccgccgacctgaaagggctgaaaatccgcaccaacaatagcccgatgaatatcgccgcattcaaagtctttggcgctaacccgatcccgatgccgtttgccgaagtctataccgggctggaaacccgcactatcgacgctcaggaacacccgatcaacgtcgtctggagtgcaaaatttttcgaagtgcagaagttcctttctctgacgcaccacgcctattccccgcttctggtggtgatcaacaaagcgaagtttgatggcttaagtccggagttccagcaggcgctagttagttctgcacaagaagcgggtaactatcagcgcaaactggttgctgaagatcagcaaaaaatcatcgacggcatgaaagaagcgggcgtggaagtcatcaccgatctcgaccgcaaagcctttagcgacgcactggggaatcaggttcgcgacatgtttgttaaagatgtgccgcagggagctgatctgctgaaagccgtggatgaggtgcaataaaccatgacgcaatactggctggggttagattgtggcggtagctggctgaaagccgggctgtatgaccgcgaaggccgggaggcaggcgtgcagcgcctgccgctgtgcgcattaagcccgcagccaggctgggcagagcgcgatatggcagaactgtggcaatgctgcatggctgtcattcgcgccctgcttactcattctggtgttagcggggaacaaattgtcggtatcggcatctccgcacagggaaagggcttgtttttgctggataaaaacgacaaaccgctcgggaatgctattttgtccagcgaccgccgggcgatggaaatcgttcgtcgctggcaggaagatggcatcccggaaaaactctacccgctgacccgacaaaccttgtggaccgggcatccggtgagcctgttacgctggctgaaagagcacgaaccagaacgctacgcgcaaattggctgcgtgatgatgacgcacgactacctgcgctggtgtttaactggcgtcaaaggctgtgaagagagcaatatttccgagtccaacctctacaacatgagtcttggggaatatgacccgtgcctcaccgactggctggggatcgctgaaatcaatcacgccctgccgcctgttgtcggatctgccgaaatctgcggggagatcaccgctcagacagccgccctgaccggtctgaaagcgggtacgcccgttgttggcggcctgtttgatgtggtttccaccgcactctgcgccgggatcgaagacgaatttaccctcaatgcggtgatggggacctgggcggtgaccagcggcataacccgcggtttacgtgacggtgaagcgcatccgtatgtctatggtcgctacgttaacgatggtgaatttatcgttcacgaagccagccctacctcttccggcaacctcgaatggtttaccgcacagtggggagaaatcagctttgatgagatcaatcaggccgttgccagcttgccgaaggctgggggcgatctctttttcctgccgttcctgtacggcagcaacgccggactcgagatgaccagtggtttctacgggatgcaggccattcacacccgcgcgcacctgttgcaggccatctatgaaggggtggtgttcagccatatgacccacctcaaccgaatgcgcgaacgttttactgatgttcacaccctacgcgtcactggcggcccggcgcactccgatgtctggatgcaaatgctggcggacgtcagcggtctgcgtatcgagctgccgcaggtggaagaaaccggctgctttggtgcggcccttgccgcccgcgtcggcaccggggtttatcacaacttcagcgaagcccaacgtgacttgcgacacccggtgcgcaccctgctgccagatatgaccgcccatcagctttaccaaaaaaaatatcaacgttatcagcatctcattgccgcacttcagggctttcacgcccgcattaaggagcacacattatgagccgaccacttctgcaactggccctcgaccacagtagtcttgaagccgcgcagcgcgacgtgacgctgttaaaagacagcgtcgatatcgtcgaagcgggcaccattctctgtttaaacgaagggcttggcgcggtgaaagccttgcgcgaacagtgcccggacaaaatcatcgttgctgactggaaggtcgccgacgctggtgaaacgctcgcgcaacaggcgtttggcgcaggcgctaactggatgaccatcatctgcgccgcgccgctcgcgacggtagaaaaaggccacgcaatggcacaacgctgcgggggtgaaattcagatagagctgttcggtaactggacgctggacgacgcccgcgactggcatcgtattggcgtgcggcaggccatttatcatcgcggtcgtgatgcacaggccagcgggcaacagtggggcgaagccgatctggcacgcatgaaggcgcttagtgatatcggccttgagctttccattactggcgggattacccctgctgacctgccgctgtttaaagatatccgcgtgaaagcgtttattgccgggcgggcactggcaggcgcggcaaatccggcgcaagtggctggcgatttccatgcgcaaatcgacgctatctggggaggtgcgcgtgcgtaatcatcagttagggatttatgaaaaagcgctggcgaaagatctctcctggccggagcggctggtgctggcaaaaagctgcggttttgattttgtcgaaatgagcgtggatgaaaccgacgaacggctcagtcgtcttgactggagcgccgcacaaaggactagcctggttgccgcgatgatcgaaacaggtgttgggatcccgagcatgtgcctgtccgcacatcgtcgctttccctttggtagccgtgacgaggcagtgcgcgaacgggcgcgggaaatcatgagtaaagcgattcgcctggcgcgcgatctcggcattcgcaccatccagctggcaggttatgacgtctattacgaagaccacgacgaaggcacccggcaacgttttgctgaagggctggcgtgggcagtcgaacaggcggcggcaagtcaagtaatgctggcggtggagattatggataccgcgtttatgaactccatcagcaaatggaaaaaatgggacgagatgctcgccagtccgtggttcaccgtctacccggacgtcggcaacctcagcgcctggggcaatgatgttcccgccgaactgaaactgggcattgaccgtatcgccgcgatccacctgaaagacacccagccagtcaccgggcaaagtcccggacagttccgcgacgtgccgtttggcgaaggctgcgtcgatttcgttggcatcttcaaaacgctgcataaactgaactatcgcggttctttcctgattgagatgtggaccgaaaaagccaaagagccggtgctggagattattcaggcgcggcgttggattgaagcgcgtatgcaggaggctggatttatatgttaacgtaaatgcaggaggctggatttatatgttagagcaactgaaagccgacgtgctggcggcgaatctggcgcttcccgctcaccatctggtgacgttcacctggggcaatgtcagcgcggtagacgaaacgcggcaatggatggtaatcaaaccttccggcgtcgagtacgacgtgatgaccgccgacgatatggtggtggttgagatagccagcggtaaggtggtggaaggcagcaaaaaaccctcttccgatacaccaacgcatctggcgctctaccgtcgctatgccgaaattggcggtattgtgcatacccacagccgccacgccaccatctggagtcaggccgggctggatctccccgcctggggcaccacccacgccgattatttttacggtgccatcccctgcacgcgacagatgaccgcagaggagattaacggcgaatatgaatatcagaccggcgaagtgatcattgaaaccttcgaagaacgtggcaggagtccggcacaaatcccggcggtgctggtgcattctcacggcccgttcgcatggggtaaaaacgccgccgatgccgtgcataacgccgtagtactcgaagaatgcgcctatatgggtctattcagccgccagcttgcgccgcagctccctgcgatgcaaaacgaactgctggataagcactacctgcgtaagcatggggccaatgcctattacgggcagtaatccctcacgccggggcttcatcgccccggcactacgaattgatatgttccttgctgtaacgccgcttccacgctgctggcgttaaaccagtatgtttctgaaaaatctgccggaaatagccaacgtcattaaaccgtattgcatggagcaggccgacaacgtcgagtcactgcataacctgttgctgcccgccgatgcgccatttacgacatttgaaggcaagggattgttcagccataagatcctgattcagacgccaggttcccggtatgaacagagcaatccagagcaacaacctttgtggcattacgacggagcaccagccgcaccgacatccaccggtgaattaaaaacgccagctcaccccggtgacaaaggtaaaactctcattacgatcaatcatcgggctgtcggtaatctcttccggcagctcgctgtatcctgcgctcgccatcaatacgacgtgctctcctatcgggtattttgccgtcaggctgacatagggcacccaggcatcctgcgcggaataacttgccagaccgctacgacgggactcactctcactaatgccatagtaatagtcactgaaattctcgtcataatagagaacgcccagcgcaggtgtcaggctcagacgacctatccgcattttgtggaatacgcttagctcccccacccagccgttgctgttatccagaacgtccgcagctgcagaggctttcacggttccccaacgctcgtggtgataccaggcaacccccgccatagccgtactatcacgcttatcaagctgttgcatggcataatcgtcattatcggtagggtcaaattccagcggcatccaggatgcggtcaggctaagttcatttttttcactttggctcagaataaaacctaacgtggtctgacgaacataaaaagtatcaccttcataactaatcagcggaattgccttcgtattttcattataaccgcgataagggctttcattataagccgcaccagcaccaatggataattcagaagcagttgcgcttgccataaaaggcaacgcaaataacgccacaatattgcgattaattaacatgtccggtattccattttaaaataagataaaaaagagtcggcataataatgcttacaatttctccggtgcaagattcatatttatatagtaatatataaaattatatataattgggctgttgcgatgacaaaattacaacttaagtaccgggagttaaaaattatcagcgtaatcgctgccagtgaaaatatcagccatgccgcgactgtacttggcatcgcacaggccaacgtcagcaaatatcttgctgattttgaaagtaaagtgggtttaaaagtccttgaccgaaccacccggcagctgatgctcacaccttttggcaccgcgctgttaccgtacatcaacgacatgctggacagaaacgagcaacttaataattttattgcagattataagcatgagaaacgtggtcgggtcaccatctacgccccaaccggcataattacctatttatccaaacatgtaatcgataaaattaaagatatcggtgatatcaccttaagcctaaaaacctgcaatcttgagcgtaatgccttttatgaaggcgtcgaatttcctgatgattgtgatgttttaatcagctacgctccaccaaaagatgaaagcctggttgccagttttattacccaatatgccgtaaccgcttatgccagccagcgctatcttgagaaacatcccattagccgtcctgacgaactcgaacatcactcctgtattttgatcgacagcatgatgatcgacgacgcgaatatctggcgcttcaacgtcgccgggagtaaagaggtgcgggattatcgcgtgaagggaaattacgtttgcgacaacacgcaatctgcgctggagctggcacgaaatcacctggggattgtgtttgcgccagacaaaagtgtgcagagcgacctgcaagacggcacgctggtgccctgctttcagcaaccctatgaatggtggctggatctggtggctatcttccgtaaacgggaataccagccctggcgggtccagtatgtgctggatgaaatgctgcgtgaaattcgccaccagcttgctcagagccagcaactgcggcctgaacaagcggcggaaagcgaagattaatgatcgagataaaggtaatgcacccagctggtcatgcgtaatagcactttgcgcatcacgctgacatggctgaaatgatcagagtaaaccgccacctgggcgtaaataccgtctggtaaagcgctcaaatcagtgtgctcatccagttcaatggtcgcgataacgccatcactacccggcgctgtgtttaacgtctgtaaggtgccggtgctctgataagctccgccgggaacggctggactaatggctgccagcttaccgctgaataccttacctggcagagcattaaacaccacttccgcatcgtcgccaggagccagtcgcagcaaggagttctgacggaactgcgccacgatttgtcgtttctgatcgggtataaacaccatcaccggacgtagcggcaggctcgcggcataggtacccggacgaatcagtacctgggtcacataaccatcgctcggcgcacgcactatcgtctgctcaaggttatattttgcttccgcgagctgtgctttcaggctggcgatttgagaatgttcacccaacaccaggctatccagctggctctggatctgtttttgttccgccgcgctactcttcacggaggcttcctgcgccagataattttgccgcgccacatcgatatcgcgttcactaaacgggtttactttcgcctggctgccacgtgcgtaacgctgatactctttagcgaatttatcccgcgtggcctttgcctgctgagtattcgccgccatctcatctaactctgcgcccaacgcccgctgtttatgttctgcggtaacgatatccgccatcagccgatccacccgcgcctgataacgcgtcgggtccagtcgaaatagcacctcaccttttttaatcagcgtatttttcttatccgtcacttcaatcaccacaccagtcacctgtgggacaacaggaatagaaataaccgctttttgcgctttaaaggtatacggatggttatagttcattaacagaattagaccgctgacaataaatattccacccagggccgctgtgggaatggtccatttatttacgggaattttgaagatcttaaacattgcccatgcaaaagccacataggtcaaaataatcagtaaatccataagtattactcggcagaagaggatttgatgtcggcgagctgtttctccagcccggcaatgcgctgttgcagttgcataacggaactatcatggctttgcattccccatccccgctccgggcggtaaagcgtggcccaaatccacaaaaacggccagataacatgtaacgtaaaaagactcacccaaccagcaacatgaatggcgtcggcatgaggatgattacgttttttggcaatcaggtagggaatatcatgtaaaataatgatcccatagaagatcaccagaaatacaaaaataagcactcccagtgcaaaatagtccaggaacatatttccctcaaagaatataaaaaagaacaattaacgcatattatgaaatgccatgatgcagtgcaatttccttatttatataacgacatattgttttttatatactttcttaaatgtgctgtctggtttttcaacaggacgaggtttatcatattgaaatagtggaactattggccaaactaatgaataactccagtaaaacatccacagtacagattaagcgtattaaaccttcaattatctaccgtttattgctgattggcctcggatcaccaatggtgatttacggcctggttcgcccgctcaccatcgaaacgcgagattaaactcctgacaaaacacgccccagaaacgtacttctgttggcgtagtctgggttattgcgcacgtaggtttaaaacgtaaattgtaacaacgtgcgctttgtttatgccggatgcggcgtgtacgccttatccggcctacggtcaggttcccgtaggcatgataagacgcgtaagcgtcgcatcaggcaatgaatacccaatgcgaccagcttcttatatcagaacagccccaacggtttatcgctgtagctcaccagcaggcacttggtttgctggtaatgctccagcatcatcttgtgggtttcgcgaccgataccactttgtttgtagccaccaaacgccgcatgtgccgggtaagcgtgataacagttggtccacacgcgcccagcctgtatgccgcgccccatcttataggccagattaccgttgcggctccagacgcccgcgcccaggccatattgcgtatcgttcgccagctccagcgcttcttccatcgttttgaaggtggtcaccgccagcaccgggccaaaaatctcctcctggaacacccgcatattgttctgaccaaacagaatcgtcggttcgaggtagtagccgtctttcagttcaccttccagcagcttgcgccgcccgcctgtgagcacgtcagcgccctcttttttaccgatatcaatgtagttgaggatggtttccagttgcccgtgagaaacctgcgcgcccatttgcgtcacgctgtcgagcgggttaccgctacgaatgctttcgacacggcggatggcgcgttccataaagcgttcgtagatagattcctgcactaaagcacgactcggacaggtgcaaacttcgccctggttaaaggcaaacagtgcaaagccttccagcgctttatcgaaaaaggcatcttcttcatccatcacatcagcaaagaagatatttgggctcttaccgcccaactccagcgtcaccggaataatgttttgcgttgcgtattgcataatttgttggcccacttccgtactgccggtaaacgccactttggcgatgcgtttgctggtcgccagatattcgccaattaccccacctgcgccattgaccacgttcaccacgcccggcggcagtaaatcaccgacaatttccattagcagcagtacagaaagcggggtaagacgtgcgggtttcagcaccacacagttgcccgccgccagcgcgggagccattttccagctcgccatcagcagcgggaagttccacgggataatctgccccaccacgcctaacggttcatggaaatgataggccacggtttcgctatcaacttcactgatcccaccttcctgcgcccgaatacagctggcgaaatagcggaaatggtcaatcgccagcggtacatccgcagcactggtttcgcgaatgggtttgccgttatcccaggtttcagctgtcgctaacagctcgaggttttgttccattcgatcggcaatcttaaacagaatcgccgcacgatcctgcacgctggtgtgcgcccatttatctttcactttgtgcgcagcatccagcgccagatcgatgtctcgtttgccgctagacgccacttcgcacagcagctgcccggtcaccggcgtcagattctggtaatactcgccgtcggcaggggctacccattcgccgccaataaagttgtcatagcgggcttttaacttgagggggaaaccatactcgccgggcttaatctgtgcactagggggattattggtcatgatcgtctccttgcggtgtgaggtataacaagggtagacgtgactggcgaaatcttcgccagtcggtaacagctttacgacagctatcacgaatttacgggcaagggttacagagatagttgaaaaagcggctaacaatttgccagccgttgtggaaatgatgattacatcgctgcgcgataaatcgccacaatttcttcgtgagttgcctggatcgggttagtaaagccacaggcatctttcagggcattagtcgccaataccgcgaaatcttcttctttcacgttcaggtcgcgtaggcctgccgggatatccactttcttcgccagttcacggatggcgttaatgcaggcttcagcaccttccgcgtcgtttttacctgtcacgttcacgcccattgcagcggcacagtcacgcagacgtgcagcggcgactttgctgttgaatacctgaacgtgcggcagcaaaacggcgttacatacaccgtgtggcaggttgtagaaaccgcccagctggtgcgccatcgcatgaacataacccagagaagcattattgaacgccataccggcgaggaactgggcataagccattgcttcacgcgctttcgcattactgccatcttcaacggctaacggcaggttttcggcaatcatggtcacggctttcagtgcacaagcgtcagtgatcggcgtggcggcaatagaaacatatgcttcgatagcgtgcgttaaggcatccatacccgttgcggcggtcagactcttcggcataccaatcatcagagaggagtcattgacagaaagcagcggagtgacatgtttatcaacaatcgccattttgatatgacgcgcttcgtcagtgatgatgcagaaacgggtcatttcagaggccgtacccgccgtggtattgatggcgatcatcggcagctgcggttttgcagagcggtcaacgccttcgtaatcgcgaatatcgccgccattggctgccaccagcgcaataccttttgcgcagtcgtgtggagaaccaccgcctaaggagatcacgctatcgcaattattctctttaagtaatttcaaacctgcggcgacgttttccgtggtggggttaggttgggtgccatcataaataacgctaaaaatattgcgttcttccagtgctttttgcacatcgcccgccatacctaatttcgttaacatattgtcagtgacaattaaggtacgggtaaatccataatctgccatcatattcattgcatcagtcaaactatcagcgccgatgacattcacagaaggaataaagaacgtactagctgccataacacactcctgaaagtgtaaaaaagggcgggcagcttactgaggattttcattcgaaaatatgatcagtattattgattatcaaaattaatctaataaaaagcacattgtattcattaaacaatgtgctttttttaaattcataagaattttgtattaatttattttaaaacttaattaatcatttccttatttttccggaaataataatgcgtcgcgcaataaatgatcatttccacgacgacgcgtaaagccaatgcggtcaaaatattccagaatctgaattgccagctttcggcctacgcctaagcgatcgcggaaatccgccgcgcaggtactaccacactcctgatcgagatcgcggatcatattggcaaactcgacaatccgatcgttacggtaataacgatctttaacgatcgcggtaattattccttgctgcgccgcctggcgtagagtcaggcgcattgcctgctcgtcggttcccgtctcttttgccaggtcacgcacccaccacggttcgtcaccaaacagtggctctgctttttgccagatggcctgctgctcttcgctgaagcccgctttgtgatctggcagatgcagccagccgtgatggctgtggatgtcgccgctttcgcgcatcttttcaatcagcaacagtaccagcgcttcatcttccattggcaacgccatacgtcgcagacgttcgcgcccagggccaggttcatcgcgatgttgctcatgataagtcgctaatgtgtcgagaattttccgctgccagcgggcggcaaccggcgcattcaacaagctataaccagcctgaatataaccaggctgttgcagcaattcgcgcatcccttcgccgttgagctggcgcgcccaggcgaaatccgcaaggttaaccgcgccgcgttccagatgaacagataacgcatcggcatcgctctgcgcccgtgcaagagacgccagccattgcagatattccggcttacgtttaccgcgacgcggcgggttaagcatcacgacgcgcgctccggccagcgtgttgcgggcagagatatcgcgcaataccaggcggtcgttatctgccagccataacggggtgtcgaagaccagttcagcaaggttatcttccagcagactaacgcgtcccgtgacgtggctggcggcgtggtgaatatgcagcggctgccactgggtcagcggtgtatgggtttgaagctcgacaatcacccgtgtgaacggctctggcggcacatcggcaagcagccagtcgccacggttaatctgctctttttccgcatcacccgcgatgttaagcgcgatacgctgcccggcattggcggtttctgttggctggttttgcgcatgcagcgcacgtacacgcatcggtttatttacaccagtcagccagagactatcgcctaccttcacttccccgcttaacgccgtaccggtgacgaccagcccggcaccttttacggtaaatgcgcggtcaatcgcgaggcggaaactatgttggctggcgtgctcgcgttccggcaactgaagcagatgctcgcgcagggcatccattccccgaccttcggttgctgcggtgataaacagttttgcctcagcaaaaccgtattcccgcagaacctcctttacctggcgttcaacctcatcaacacgcgcttcgtccacgcgatcggctttggtcagcgccactgtcagcatcgggttaccggtcagctgcaaaatcgccagatgctcacgggtctgtgccatcacgccgtcatcgcacgccaccaccaacagcgcgtgatcgataccaccaacgcccgccagcatgttggaaagaaacttttcatgaccgggaacgtcgataaaaccaggcacgcgaccatccggctgcggccagtaggcatagccgagatcgatggtcatgccgcgctttttttcttccggcagacggtcagcatttacgccagtaatcgcctgcaataaggttgttttgccgtggtcaacgtgtccggcagtcgcaataatcatttcaacaacatctccaaaaaccgttgctcatcttcaaggcagcgtaaatccagccacaatcgtccgtcataaatacgaccaatcaccggcactggcaattcacgccagcgggcggctaaactctcaaggtggctaccgcgtccatcatggggtgtaaacgttaatgccgcgctcggcaggcgatcaaccggcaggctaccactgccaatctggctaagacatggcataacctgtaccgcaaactccgcgccgtaatgtgcggcaaggggggcctgtaaacgttgtgcctggatttgaatgacctctgcgctgcgggtaagcaggcgcagggtcggtaatttttcactcagagcttcagggtgtaaataaagacgcaacgtggcttccagcgccgcgagggtcattttatccgcgcgtaatgcacgcttcagcgggtggctttgcaggcgggcgatcatctcttttttaccaacaataattcctgcctgcggcccgcctaacaacttgtcgccggagaaactcaccagactgacgcccgccgcaatcaactcctgcggcattggctctttcggcaaaccgtactggctaagatcgaccaggctgccactgcctaaatcagtcactacgggaacatccagctctttgccgagcgccaccagttccgcttcatctatcgctttggtgaacccctgaatgctgtagttactggtatgtactttcatcaacagtgcggtattttcattcaccgcctgacgataatcattcgcgtgcgtgcggttggtggtccctacttcgtgtagggtgcagcctgcctgacgcataacatcgggaatacgaaacgcgccgccaatctccaccagttcgccgcgagataccaccacctcttttccgctggcagtggccgccaacatcaataacaccgccgccgcattgttattgacgatacaggcatcttccgcccccgtaatacggcacagcagctgcgccagcgcccgatcgcgatgtccgcgtccggcgtcgtccagatcatactcgagggtcactgggctacgcatagcctgcgcaacggcttccaccgcggcttccgcctgtaaagctcgcccaaggttggtatgcagcacggttcccgtcaggttgatcaccggacgcagcgcgctctgcgcttctttcgtcaaccgggcatcgacttcttgcgcccagttttcacaccacgcaggcagcgtctggctgccacgaatcacttctcgcgcttcgtcgagcatctgacgcaacaattccaccacgcgggtgtgaccataagtatcacgcaaagaaaggaaggagctatcgcgcaataagcgatcaatagccggaagttgactatagagggaacgcgtttcggttgtcataggaaacctggctgatcaaggccctctcacacggagaagggcgtttaacataaccacggattgtaacgtgagatgggtcaggaggacatatcgcgcatcaagcctttggcggttcggtgcgagcaaaactttcgcggctaaacaggttttcgaccagtttgactaagtgtgggcggtcgacacaccaacctggcgcaacgcggcggaaattgagatatccgacggcacaggcaatggcgatagtcgccagattgaccgtatcggttttgagtgtgccatcgaccagatatccttccagcacatccagactgcggttgattttctcccgctggcgtaacaattcatcttcagactgctgcgccgctggacgcgcctgttcacgcacgcttaccagcccggcatccataatgccatccgccagtgcctcaattttgcgcacccgcaagctctccagcggatcgcgcggcaacatcgccggagcgacattcattaattcaatatattcagcgatgatcgggctatcaaaccagcattcgccctcttcggtcaccagcaccggcacttttcctaacgggttaaattgcgccacgccgttgtccgcgttatagggcagttcattaataaattcgaaagttatgcccttttctaacaacagaatagaaagtttgcgtacaaacgggctggtgtagctaccgacgagtttcatgccgagtcctttgtgcgaggaaaaatatcagtatggctcaatgatccaaataaagataatgcatccagctggtcattcttagcagcactttccgcatcacgctaacatggctgaaatggtcggagtaaaccgccacctgggcgtagatgccgtcgggtaaggcatcgatatcatcgttagggtccagttcaatggttcccagcacaccgtccgtgccgggcacgaccgttaaactttgcaataccccctgcgcctgataagaaccgcctggcacgacaggtaaaatactagtcagtttgccgtgaaacacctgcccaggtagcgcgttaaacaccacttccgcatcatcgccaggtttcagacgtaacaggctgttttgccgaaattgggcgacaatttgccgtttttgctcggggatgaagaccatcaccggacgcagcggcaaggcagctgcgtatgtacctgggcggatcagtacctgagtaacgtagccattgctcggcgcgcgaatgacagtctgctcaaggttatattttgcttcagtaagttgcgctcttaagctcacaatctggctttgctcgccgttaaccatactgtcgagctggctctggatctgcgcctgctccgccacgctgcctttcaccagcgcatcctgcgcgaggaaattttgccgcgcatcgtcgatgtcacgttcgctgaacggattcaccgccgcctggctgcctttcaagtaacgttgataatttttaaacagacggtcgcgctccgcactaacctgggtggtgttggcctgcgcttcagtgagctgcgcacgcagcgtctttatattatgcgtcgccgtcatcaggtcagcctgaagtctgtcaactcgcgcctggtaacgaaccgggtcgagcttaaaaagcacctcgcccttttgaataagctgattattcttgtcagtgacttcagtaacaattcccgtcacctgtggcgtgatagggatcgctatcactgccttttgcgcggtaaaagtgtaagggtggttgtagttcatcaacaaaatcaaaccactcaccagaaacacgcctcccagcgccgccgtcgccagcgtccactgatttaccggaatgcggaagattttaaagaccgcccacgccagcgccacgtaagttaaaacaatcaatagatccataattagatctccgggaacgtggaatagtcagtctttttctcggcggcgagttgatgctccaaccgggaaattcggtcagaaagtgcggcgatttccgggtcagtcgctttctcctggctcgcaacatgactctgcataccccagccacgctccggttgatagagcgtcgcccagatccacagaaacggccagataacatgcagagtaaacaggctcacccagcccgccgtatgaatagcgtcggcatggggatggttgcgctttttggcaatcagataagggatgtcatgtatcgcgatgattccataaaaaatcaccagaaagacgaagatcagcactcccaacgcgaaatagtttagaaacatatctgcctcggattcacgtttatcagtgttgtttttgggctggcagccagaagggagtcaggctgatattttgacaataatccgggttcgcgattctcgccataacaccaaagaataatttttagaggtgatgagttgcttagttacataacgattgtatgacgaaggcataacatgctgtagatcacatcaggtgaacgccgtaagaaaatatcttgtgattcagatcacaaagattcaacaaaccatcaaaacaaaaatgtgacactactcacatttaaatgccatttttagcgaaaatcgccgccttgttgcttttttacacaagcgttttgtgatgaacgtcacgtcaattacctctctaccccctatatttatgtgattgatatcacacaaaaggccgtcgactggacagttaaccgattcagtgccagatttcgcagtatctacaaggtccggctacctctgccgccacattaacaaaaaacctcgggcttccagcctgcgcgacagcaaacataagaaggggtgtttttatgagttccgatattaagatcaaagtgcaaagctttggtcgtttcctcagcaacatggtgatgccaaatatcggcgcgtttatcgcgtggggtatcatcaccgcgttatttattccaacagggtggttaccgaacgagacgctggcgaagctggtcgggccgatgatcacttatctcctgccgctgctgatcggttataccggtggtaagctggtaggcggcgaacgtggcggcgtagtcggtgccatcaccaccatgggcgttatcgtcggcgcagacatgccgatgttcctcggttctatgattgcaggtccgctgggcggctggtgcattaagcacttcgaccgctgggtagacggtaagatcaaatccggttttgagatgctggtgaataacttctccgcaggcatcatcgggatgatcctcgctattctggcattcctcggcattggcccgattgttgaagccctgtccaaaatgctggctgcgggcgttaacttcatggttgtccatgacatgctgccgctggcgtctatctttgttgaaccggcgaaaatcctgttcctcaacaacgccattaaccacggtatcttcagcccgctgggtattcagcagtcccatgaactgggtaaaagtatcttcttcctgattgaagctaacccaggtccaggtatgggcgtgctgctggcgtacatgttctttggtcgtggtagcgctaaacagtctgcgggcggtgcggcaatcatccacttcctggggggtatccacgaaatctacttcccgtatgtgctgatgaatccgcgtctgatcctcgcagtcatcctcggcggtatgactggcgtgttcacgctgactatcctgggcggtggtctggtttctccggcatctccgggttctatccttgctgtactggcgatgacaccaaaaggtgcttacttcgctaacatcgcgggtgtgtgtgcggcgatggctgtctccttcgttgtctctgctattttgctgaaaaccagcaaagtgaaagaagaagatgatattgaagcagcaactcgtcgtatgcaggacatgaaagctgagtctaaaggcgcatctccgctgtctgctggcgatgtgactaacgacctgagccacgtacgtaaaatcatcgttgcctgtgacgccggtatgggttccagtgcgatgggcgcaggcgttctgcgtaagaaaattcaggatgcaggtctgagccagatttctgttactaacagcgcgatcaacaacctgccgccagatgtggacctcgtcatcactcaccgtgacctgaccgaacgcgctatgcgccaggttccgcaggcacagcatattagcctgaccaacttcctcgacagcggcctgtacaccagcctgaccgaacgtctggttgctgcccaacgccacacggcaaacgaagagaaagtaaaagacagcctgaaagacagctttgacgattccagtgctaacctgttcaagctaggcgcggagaacatcttcctcggtcgcaaagcggcaaccaaagaagaagcgattcgttttgctggcgagcagctggtgaaaggcggttacgttgagccggaatacgttcaggcgatgctggatcgtgaaaaactgaccccgacttatctgggtgagtctatcgcggtgccacacggtacggttgaagcgaaagatcgcgtactgaaaacgggcgtcgtgttctgccagtacccggaaggcgtgcgcttcggtgaagaagaagatgacattgcccgtctggtgattggtattgctgcccgtaacaacgagcacattcaggttatcaccagcctgaccaatgcactggatgatgagtccgtcatcgagcgtctggcacacaccaccagcgtggatgaagtgctggaactgctggcaggtcgtaagtaatccaatcccaccctctccacatggagaaggtggggttaattgcctgatgcgctacgcttatcaggcctacaggatgcatcacaatttgttgaatttgcacgttcttgtaggccggataaggcgcttacgccgcatccggcgctgcccctctcctcacggagagggtttgggtgagggaaaagcctcaccccagccctctcgggtaaaaacattgatgaaggttaatactatgaaagcattacattttggcgcaggtaatatcggtcgtggctttatcggtaaactgctggcagacgcgggtatccaactgacgtttgccgatgtcaatcaggtggtacttgatgccctgaatgcccgtcatagctatcaggtacatgtggttggtgaaaccgagcaggtagataccgtttccggcgtcaatgctgtcagcagcattggtgatgatgtcgttgatctgattgctcaggttgatttagtcactaccgccgttggcccggttgtgctggaacgtattgctccggcaatcgccaaagggcaggtgaaacgtaaagaacaaggtaatgaatccccgctgaacatcatcgcctgtgaaaacatggtacgcggtaccacgcagctgaaaggccatgtgatgaacgccctgccggaagacgccaaagcgtgggtagaagaacacgttggctttgtcgattccgccgttgaccgcatcgtaccgcctagcgctagcgcaactaacgatccgctggaagtgacggtagaaaccttcagcgaatggattgtcgataaaacgcagttcaaaggcgcactgccgaacatcccaggcatggagttaaccgacaacctgatggcatttgtcgaacgtaaactcttcaccctgaacacgggtcatgctataaccgcgtacctcggaaaactggccggtcatcagaccattcgtgacgcgattctcgacgagaaaatccgcgcggtggtaaaaggtgcgatggaagaaagtggtgcagtattgatcaagcgctacggctttgacgctgacaagcatgcggcgtacatccagaaaattctcggccgttttgagaacccgtatctgaaagatgatgtagagcgcgtaggccgtcagccactgcgtaaactgagtgctggtgaccgtctgatcaagccactgctcggtacgctggaatatggtctgccacataaaaacctgattgaaggtattgccgctgcaatgcacttccgcagtgaagatgatccgcaggctcaggaactggcagcactgatcgctgacaaaggtccgcaggcggcgctggcacagatttccggtcttgatgccaacagcgaggttgtatccgaggcggtaaccgcttataaagcaatgcaataatggtggaccaggcgcaggacaccctgcgcccgaataacagattgagtgatatgcaggcaacaatggaacaaacccaggcctttgaaaaccgtgtgcttgagcgtctgaatgctggcaaaaccgtgcgaagctttctgatcaccgccgtcgagctcctgaccgaggcggtaaatcttctggtgcttcaggtattccgcaaagacgattacgcggtgaagtatgctgtagaaccgttactcgacggcgatggtccgctgggcgatctttctgtgcgtttaaaactcatttacgggttgggcgtcattaaccgccaggaatacgaagatgcggaactgctgatggcattgcgtgaagagctaaatcacgacggcaacgagtacgcctttaccgacgacgaaatccttggaccctttggtgaactgcactgcgtggcggcgttaccaccgccgccacagtttgaaccagcagactccagtttgtatgcaatgcaaattcagcgctatcaacaggctgtgcgaagtacaatggtccttagtctgactgagctgatttccaaaatcagcttaaaaaaagcctttcaaaagtaagcaacgtctgcttactgcccctctacctgcttcggccgataaagccgacgataatactccagacgttgtagatataacggcacgctttcatcgggtattccggacggaatcgcgttacggggaggaagttttttcagatactcccggaacgcctggctacttgccatgaaatctacggctttatcgataagaagcggaacgttttcacctaatttgcccatgatgatatctccgtattaccccgcgccgggaatgcgcggccgccaattttagtttaggttcccggtaaagatgacattaaggaaaacgtgctgaatcctcaataatcatccgctgctgtttattatcttttttctatagatttcttaattaatcaacgaattgcgcagtttttgagcatgttaatgattacgttacagaactattacaatgtcattagttgtgaacaaagcacctggtcgcgcatactaggggctataaatttatctttatcagaagccatcacatgaaagaagtcgaaaaaaacgaaatcaaacgcctcagcgatcgcctggacgccatccgccaccagcaggccgatcttagcctggttgaagccgcagacaaatatgccgagctggaaaaagagaaagccacgctggaagcagaaattgctcgcctgcgtgaagttcatagccaaaaactgagtaaagaagcacagaagctgatgaagatgccattccagcgcgcaattaccaaaaaagagcaggctgatatgggcaagctgaagaaaagtgttcgcggactggtcgttgtgcacccaatgaccgcactgggccgcgaaatgggcctgcaggagatgactgggtttagtaagaccgcgttttaagaacacagtatctacagggtgattctgcacattcctataggccgagtaaggtgttcacgccgcatccggcaagataaggcgctctggatcaacaacctaagggcaattctctgatgaggattgcccttttctttaccagacatctccccccacaagaattggccctaccaattcttcgcttatctgacctctggttcacaatttcccaattaaaactcacatcaatgttgccaatacataacatttagttaaccattcattgtcattatccctacacaacacaattggcagtgccacttttacacaacgtgtgacaaggagatgagcaacagactcattacacgatgtgcgtggactccaggagacctgcaatgaatctctggcaacaaaactacgatcccgccgggaatatctggctttccagtctgatagcaagccttcccatcctgtttttcttctttgcgctgattaagctcaaactgaaaggatacgtcgccgccagctggacggtggcaatcgcccttgccgtggctttgctgttctataaaatgccggtcgctaacgcgctggccagcgtggtttatggtttcttctacgggttgtggcccatcgcgtggatcattattgcagcggtgttcgtctataagatcagcgtgaaaaccgggcagtttgacatcattcgcagctctattcttagcataacccctgaccagcgtctgcaaatgctgatcgtcggtttctgtttcggcgcgttccttgaaggagccgcaggctttggcgcaccggtagcaattaccgccgcattgctggtcggcctgggttttaaaccgctgtacgccgccgggctgtgcctgattgttaacaccgcgccagtggcatttggtgcgatgggcattccaatcctggttgccggacaggtaacaggtatcgacagctttgagattggtcagatggtggggcggcagctaccgtttatgaccattatcgtgctgttctggatcatggcgattatggacggctggcgcggtatcaaagagacgtggcctgcggtcgtggttgcgggcggcagctttgccatcgctcagtaccttagctctaacttcattgggccggagctgccggacattatctctagcctggtaagtctgctctgcctgacgctgttcctcaaacgctggcagccagtgcgtgtattccgttttggtgatttgggggcgagtcaggttgatatgacgctggcccacaccggttacactgcgggtcaggtgttacgtgcctggacaccgttcctgttcctgacagctaccgtaacactgtggagtatcccgccgtttaaagccctgttcgcaagcggtggcgcgctgtatgagtgggtgatcaatattccggtgccgtacctcgataaactggttgcccgtatgccgccagtggtcagcgaggctacagcctatgccgccgtgtttaagtttgactggttctctgccaccggcaccgccattctgtttgctgcactgctcagcattgtctggctgaagatgaaaccgtctgacgctatcagcaccttcggcagcacgctgaaagaactggctctgcccatctactccatcggtatggtgctggcattcgcctttattagcaactattccggactgagtagtacactggcgctggcactggcgcacaccggtcatgcattcaccttcttcagcccgttcctcggctggctgggggtattcctgaccgggagcgataccagttctaacgccctgttcgccgcgctgcaagccaccgcagcacaacaaattggcgtctctgatctgttgctggttgccgccaataccaccggtggcgtcaccggtaagatgatctccccgcaatctatcgctatcgcctgtgcggcggtaggcctggtgggcaaagagtctgatttgttccgctttactgtcaaacacagcctgatcttcacctgtatagtgggcgtgatcaccacgcttcaggcttatgtcttaacgtggatgattccttaatgattgttttacccagacgcctgagtgacgaggttgccgatcgtgtgcgggcgctgattgatgaaaaaaacctggaagcgggcatgaagttgcccgctgagcgccaactggcgatgcaactcggcgtaagtcgtaatagtctgcgcgaggcgctggcaaaactggtgagtgaaggcgtgctgctcagtcgacgcggcggcgggacgtttattcgctggcgtcatgacacatggagcgagcaaaacatcgtccagccgctaaaaacactgatggccgatgatccggattacagtttcgatattctggaagcccgctacgccattgaagccagcaccgcatggcatgcggcaatgcgcgccacacctggcgacaaagaaaagattcagctttgctttgaagcaacgctaagtgaagacccggatatcgccagtcaagcggacgttcgttttcatctggcgattgccgaagccagtcataacatcgtgctgctgcaaaccatgcgcggtttcttcgatgtcctgcaatccagtgtgaagcatagccgtcagcggatgtatctggtgccaccggtttttagtcaactgaccgaacaacatcaggctgtcattgacgccatttttgccggtgatgctgacggggcgcgtaaagcaatgatggcgcaccttagttttgttcacaccaccatgaaacgattcgatgaagatcaggctcgccacgcacggattacccgcctgcccggtgagcataatgagcatagcagggagaaaaacgcatgattatttccgcagccagcgattatcgcgccgcagcgcaacgcattctgccgccgttcctgttccactatatggatggtggtgcatattctgaatacacgctgcgccgcaacgtggaagatttgagtgaagtggcgctgcgccagcgtattctgaaaaacatgtccgacttaagcctggaaacgacgctgtttaatgagaaattgagcatgccggtggcactggctccggtgggtttgtgtggcatgtatgcgcgtcgtggcgaagttcaggcagccaaagcggcggacgcgcatggtattccgtttactctcagcacggtttccgtttgcccgattgaagaagtcgcgccagccatcaagcgcccaatgtggttccagctttatgtactgcgcgatcgcggctttatgcgtaacgcgctggagcgagcaaaagcagcgggttgtagcacgctggttttcaccgtggatatgccgacaccgggcgcacgctaccgtgatgcgcatagtggtatgagcggcccgaacgcggcaatgcgccgctacttgcaagcggtgacacatccgcaatgggcgtgggatgtgggcctgaacggtcgtccacatgatttaggtaatatcagtgcttatctcggcaaaccgaccggactggaagattacatcggctggctggggaataacttcgatccgtccatcagttggaaagaccttgaatggatccgcgatttctgggatggcccgatggtgatcaaagggatcctcgatccggaagatgcgcgcgatgcagtacgttttggtgctgatggaattgtggtttctaaccacggtggccgccagctggacggtgtactctcttccgcccgtgcactgcctgctattgcagatgcggtgaaaggtgatatagccattctggcggatagcggaattcgtaacgggcttgatgtcgtgcgtatgattgcgctcggtgccgacaccgtactgctgggtcgtgctttcttgtatgcgctggcaacagcgggccaggcgggtgtagctaacctgctaaatctgatcgaaaaagagatgaaagtggcgatgacgctgactggcgcgaaaagcatcagcgaaattacgcaagatagcctggtgcaggggctgggtaaagagttgcctgcggcactggctcccatggcgaaagggaatgcggcataatcgtttgcgccccctcaccctaaccctctccctcagggagaggggaccgttcggcgctgtatgtactccctcactctgaaacgacaccgcactctttttttctccctcgcccctccggggagagggccggggtgaggggaaaaggccgcactgctcaccaattttctgctatcctgcccccgcactaagggggcagtatgctaaacatcgtactttacgaaccagaaattccgccaaatactggcaacatcatccgtctttgcgctaataccggctttcgtctgcatatcatcgaaccgatgggatttgcctgggacgataagcgcctgcgccgcgcggggctggactatcacgagtttaccgccgttacgcgtcatcatgactatcgcgcgttcctcgaagcagaaaatccccagcgcctgttcgccctcaccacgaaaggtacacctgctcacagcgccgtaagctatcaggatggcgattatctgatgttcggcccggaaacacgcggcctgccagcgagcattcttgatgccctgcccgctgaacaaaaaattcgcattccgatggtgccggacagccgcagcatgaatctgtccaatgcggtgagcgtagtggtgtatgaagcctggcggcagttggggtatccgggagcggtattgagagattaattactgtaggccggatagatgattacatcgcatccggcacgatcacaggacattagatcccatccccatactcaaatgtatggttaataccgttgaaatgctggtccatatccatacttggcttatcgctgtctggtttaccgacaatacgagccggaacgccagcggcggtggtatgcggcggcaccggttgcagcaccacggaacctgcgccaatcttcgcgccgcgcccaacttcaatattgccgaggattttcgcgcccgcgccaatcatcacaccttcacgaattttcgggtgacggtcaccaccagatttacccgtaccgccaagcgtcacagattgcagaatgcttacgtcgttttcaatcaccgccgtttcaccaacgacgatgcctgtcgcgtggtcaagcatgataccgcgaccaatttttgctgccgggtgaatatcgacctggaacgtcacagaaacctggttttgcagaaagattgccagtgcgcgacgcccctgattccacaaccagtgaccgatgcgataggcctgcaaggcatgaaaacccttcaggtataacaacggggtactgtatttatcgactgccgggtcgcgggtacgcaccgcctgaatatcacaggccgcagaggcgatcatttccgggtcagcggcgtaggcttcttccaccacttcacggatagcaatagcaggcataattgggctactcagcttgttcgccagcatgtagctcagtgcactgccaaggttttcgtgcttgagtagcgtcgcgtggtaaaaactggccagcattggctcacagtccgccagcgttctggcttcggctttaatattgttccagacaatttccagttcttcacagctcattgcttactccacacgatgagataatgaccggcccgttctgcgcgggccgggtcatagcggtaacaaaggttccctggggttagtggctgctgcgctcgtccttgcgtgcacgacctagtaaagtcaatgctgcctcgcgcgcgttttttccgcaatataatacttgataaatttcctcggttattggcatttcaacgccgaagcgatgcgccagttcgcggacttctttcgtattgcggtagccttccaccacctgaccaatcttctcctgcgcgctttgtacatccatgccctgaccgagcatcatgccaaaacggcggttacggctctggttgtcggtacaggtaagcaccagatcgccaagccccgccatgcccataaaggtggcagggtcggcacccagcgccgcaccaagacggctcatttcagccagcccacgggtgatcagcgccgtacgcgcattcgcaccaaaaccgataccgtcggacatccccgcaccaatggcaataacgtttttcaccgcgccgccaagctgcacgccaatgaaatccggattgctgtaaacgcggaaacttttgccgcagtgcagcagctgctggagatcatcggcaaaggtctgatcggtgctggccaggctaatagctgtcggtaaacctgccgccagttctttcgcaaacgttgggccagagataaccgccagcggaatttgatcgcctaaggcctcacgcgccacgtcctgtaacagacgtccggtttccgcttccagccctttggtcgcccacaccagacgcgcatcaggacgcatcagtggtttaatctggcgcagcacttcaccaaagacatggctgggtacgacgacgagaatattacggctggctgccagcgcagtggcgagatcgctttcaagatggagcgtatcgggaaaaggcacatcggggagaaacgcggcgttacagcggtcgcgttcaagcgttgcgatatgttcagggtcatggccccagaggacaacctcgtggccatttcttgccagggtgatggcaagagcggtgccgtagctgccggcaccgatcacagtcatactagcattacgttggttcatcaggcatcctgatgttcttcagtaccttcgccagcctgctgctgcaaatagttcatgaacagcgcatcgaagttaaccggcgcaaggttcagttgcgggaatgtaccgcgggataccatgctggtgatgcactcacgagcatacgggaacagaatgttcgggcagtatgctcccaggcaatgcgccatctgggtgccttcgatacccgcgatggagaaaataccgccctgctgaacttcacacaggaacgcggtttcttcgcccaaagaggccgttacggtaacacgcagtaccacttcgtatacgtcatctgccagttgggaagatgccgtatccagatcaagtttaacttctggttgccaatctttctggaaaacgtgcggcgcgttcggcgcttcgaaagagatatccttggtataaatacgttggatctggaaagtcatttcagtgttgttttgttcactcatgtgtagaaaacccttaagtgttgtccttaaatactgcgcaatgtaatgccaacgttcacacgttatttcagcaggggatccagtccaccacgtgcatccaatgcatacaagtcatcacagccgccaatgtgctgtgcgtcaataaaaatctggggaaccgtggtgcgaccgctgcgtttgatcatctcttcacgcttggcggcgttgccatcgatcggcagctcctggaaactcacgcccttgctgctcagcagtgcttttgcacgatggcaatacgggcaggtttctttggtatagatttcaacattggccataaattagctcctgtttttttaccctgaaatttcatgttgcagggcggcagcaaaatggagtgtccccagaagcttataacaataagtcgctgggggcctaattgcagctaacggcctgcatcatgaaagacgacaggtaaattatttgccgcgcaccaaaggcaagttttcgccagcccagccagcgacgccttctttcagcacgaatacttgcgcaaaaccagctttcgtcagtgcgtttgcaggctcctggcactgcatgccagaaccgtctaccacgataaccggtttgtctttgtgcttctcaagctcaccaacattgttggctttgatttcgctcggcaacagattaatagaacctgcgatatggcctttacggaagtcatcacgctgacgtaaatccacaaccacagcgtcttctttgttgatcagacgcgtagcttcaccacgagtaatcaccttcactttgctggtcaggctcttaaacgtagtcacaagaaccgccaccagtaacgcgatccaggcgatactcagtatgggatgacggccaacaaattgcataatttcttgcatggggggtaacaactcccgacgtagtgattaaaaaaaccaggaaaggagtatacctgcgcggtgcggcaaatacagccagcgcgttaactggaatgcaattttgcggggcgcgacgaaaaaaaagcgtaaatctggcatcggcttgccgcgagcggtcgtatattttgatcttcagaggctattttatcgattcagctgtagtaaaattacgcaaattttgactcttgagtatgaggttgtcgcaatgttggtttctaaaaaacctatggtactggtgattctggatggctatggctatcgcgaagaacagcaggataacgccatttttagtgctaaaaccccggtaatggatgcactgtgggccaatcgtccgcataccctaatcgacgcttccggtctggaagtcggtctgcctgaccgtcagatgggtaactccgaagtaggccacgttaacctgggtgccggccgcatcgtgtatcaggacctgactcgtctggacgttgaaatcaaagatcgcgctttctttgctaatccggtgctgactggcgcggtagataaagcgaaaaacgcaggcaaagcggtacacattatgggtctgctctccgcaggcggcgtacacagccacgaagatcacatcatggcgatggtagaactggcagctgaacgcggcgcagaaaaaatctacctgcacgcattccttgacggtcgcgacactccgccgcgcagtgctgaatccagcctgaaaaaattcgaagaaaaatttgccgcgctgggcaaaggccgcgtagcgtccatcattggtcgttactacgcgatggaccgcgataaccgttgggatcgcgtagaaaaagcttatgacctgctgactctggcgcagggcgagttccaggccgataccgccgttgctggtttgcaggctgcttatgctcgcgacgaaaatgatgaattcgtgaaagcgaccgttatccgtgctgaaggtcagccagacgcggcaatggaagacggcgatgcactgattttcatgaacttccgtgctgaccgcgcgcgtgaaatcactcgtgctttcgtgaacgctgatttcgatggcttcgcgcgtaagaaagtggttaacgtcgatttcgtgatgctgaccgaatacgccgctgacatcaaaactgcggttgcttacccacccgcttccctggttaacaccttcggcgagtggatggcgaaaaacgacaaaactcagttgcgtatttccgaaaccgaaaaatatgcccacgttactttcttcttcaacggtggcgtagaagagagcttcaaaggcgaagatcgcattctgatcaacagtccgaaagtggctacctacgatctgcaaccggaaatgagctccgcagagctgaccgaaaaactggttgcggccatcaagagcggcaaatacgacaccatcatctgtaactatccgaacggcgacatggtaggtcacaccggggtgatggaagcggcggttaaagcggttgaagcgctggatcactgcgtggaagaagtcgcgaaagcggttgagtccgtgggtggacaactgctgatcaccgctgaccacggtaacgctgagcagatgcgcgatccggcaacgggtcaggcacacacggcacacaccaacctgccagttccgctgatttacgttggtgataagaacgtgaaagcggttgaaggcggcaaactttctgacatcgcgccgaccatgttgagcctgatgggtatggaaatcccgcaagagatgactggtaagccgctgttcatcgtggaataatccctccccatgaggggaaaggcgattaataccatgacacgggccgtgaaaccgcgcaggtttgcaatcaggcccatcatctacgccagcgttcttagcgctggcgtattgttgtgcgccttttccgcccacgcggatgagcgtgaccaactcaaatctattcaggctgacatcgccgcaaaagagcgcgcggtacgccaaaagcaacaacaacgcgcaagcctgctcgcacaattgaaaaagcaggaagaagcgatctctgaagccacccgtaagctgcgcgaaacgcaaaacacgctcaatcaactcaataaacagattgatgagatgaacgcgagcattgccaaactggagcagcaaaaagccgcccaggagcgcagcctcgccgcacaactggatgccgcattccgtcagggcgagcataccggtattcagctgattctcagcggtgaagaaagccagcgtggacagcgtttacaggcttatttcggctatctcaaccaggcgcgacaagaaaccattgcccagttgaagcaaacgcgtgaagaagtcgccatgcagcgtgctgaactggaagagaaacagagcgagcaacaaacgctgttatatgagcagcgcgcccaacaggcgaaactgactcaggcgctgaacgagcgtaaaaagacgctggcagggctggagtcttccatccagcaaggtcagcaacagttgagcgagctgcgcgccaacgaatcccgtctgcgtaacagcattgcccgtgcggaagccgcggcgaaagcgcgtgcagaacgagaagcacgtgaggcccaggcggttcgcgaccgccagaaagaagcgacgcgcaaaggcaccacctacaaaccgaccgaaagcgaaaaaagcctgatgtcccgtaccggtggtctgggcgcgccgcgtggtcaggcattctggccggttcgcgggccgacgctgcatcgctatggcgaacagctacagggtgaattacgctggaaaggtatggttatcggtgcttctgaaggtactgaagttaaagcgattgccgacggtcgggtgattctggctgactggctgcaaggctacggtctggtggtggtggttgagcatggtaaaggcgacatgagtctttacggctataatcagagcgcactggtgagcgttggtagccaggttcgcgcgggccagccgattgcactggtgggcagcagtggcggtcagggtcggcctagtctctatttcgaaattcgccgccagggtcaggcggtcaatccacagccgtggttgggaagataagttttgtttccatttcgtcgtaacgttcttgcatttgccgctctgttggcgctctcctcccccgtacttgctggcaaacttgccatcgtcattgatgattttgggtatcgcccgcacaacgaaaaccaggtgctggcgatgccttccgctatctccgtcgctgtattacccgatagtccgcacgccagagagatggcgaccaaagcgcataacagcgggcacgaagtgttgattcatctcccgatggcaccgttgagtaaacagccgctggagaaaaatacgctacgcccggagatgagcagcgacgaaattgagcgcattattcgtagtgcggtcaataacgtgccctatgccgtggggatcaacaaccacatgggcagcaagatgacctctaacctgtttggtatgcagaaagtgatgcaggcgctggagcgttacaatctttacttcctcgacagcgtaaccatcggtaatacccaggcgatgcgcgccgcgcaaggcactggcgtgaaggtgatcaaacggaaggtattcctcgacgatagccaaaatgaagcggacatccgtgtgcaatttaatcgcgcaattgacctggcgcgtcgcaacggtagcaccattgccattgggcatcctcaccctgcaacggtacgcgtgttgcaacagatggtttataacctgccgccagacattacgctggtgaaagccagcagcttgctgaatgaaccgcaggttgatacttctacaccgccgaaaaacgctgtgcctgatgcaccgcgtaatccgttccgtggcgtgaagctgtgcaaaccgaagaaaccgatagaacctgtttatgctaatcgcttctttgaagtattaagcgaaagcatcagccagagcacgctgatcgtttacttccagcatcagtggcaaggctggggcaaacagcccgaagcggcgaagtttaacgctagcgcaaattaattagcgcaaattaaaggcgctacgcgtaatgcgatggtggctccgcgttttgtcgcgccattgccataagcggaaagaccacagtaacgcctggtaaccgaccttcacgctgcgcacattggtaatcaggcgcttatacataccggaagtaaatatctcggcaatcatccgttggcgggtaagaatatccggctctttgcgcaccgcatggcaaacacgcaatgcctcgtaagttatttgctgatgaaattccggataaatcataattttgtcggcataatttcgatttaatttctccagcaggcgggtaatcttaatatagtgacgttgataattaaggtttttattcccttgtctatgcaaccgactcacactcgtattatgcagataatatttatataaactttgctcggtatatcgcgcacgcagcgcgttaaacatgaattctgttgtccagacaatatcctgatgatgtaatccggcaataaatttaatgttatttttaacaataacatcacggcgataaacccccatccagacaacgtgagtccaacggcggctagaaagccccatccgcagccagtccgggccggttaatacgccggtactgcgaaggcgatcggtggggatggattgccaggtttctcccgtttcacgaaaacaccagtcagcgttgcactgcgccacgtcgaggtcgtcctctaacgccatggtcatcagcgtttcgtacatggtgggatagacttcatcgtcagcatcgacaaaagcgacatatttgcccgttgccacttcaatcccacgattacgcgccacgcttgcgccagcattcgcctgatgcaacaaacgaacgtgcggatagttttctgcgtaatactttgctatttcaacagaattatccgtactaccatcgttaataataatgatttccagagcagtccaggtttgcgtaattaaagattccatacaagtgcggaaatcatcgcccgcattatataacggaataataacactaagtttattggtgctgttcatcataaattaccgacgacctctgaagttatcctgacgttttacaggctttgtattaagaaactattaagcctgtgagatattatttttacaggtgagagagtcacttcagggtagagagataatgagagcagctatataagagatcagcacaattacgaactctttattacactgacaggattttacatatttaacagattatcctcagataaaagggctggaataccagcccttgttcgtgttaatcccagctcagaataactttcccggactggccgctacgcatagcgtcaaagcccttctggaaatcatcgatagagaaacgatgggtaatgatcgggctaagatcgaggccagactgaatcagcgccgccatcttgtaccaggtttcaaacatctcacgaccgtaaatacctttaatgaacaagcctttaaagatcactttggtccagtcgatagacatatcagacggcggaatacccagcatcgcaatacggccgccgtgattcatggtgtcaagcatggtacgaaacgctggcggcgcaccggacatttccagaccgacatcaaaaccttcggtcatgcctaactccgccatcacgtcattgagattttctttggcgacgttaaccgcacgggtgatacccattttacgcgccagctcaaggcggtattcgttaacatcagtgatcaccacattgcgtgcaccaacgtgtttcgccaccgccgctgccataataccaatcgggcctgcaccagaaaccagcacatcttcgcccaccagatcaaagctcagcgcggtatgcacggcgttaccgaagggatcaaaaattgcggctaagtcatcggaaatattgtcggggattttgaaggcgttgaatgccgggatcaccagatattcggcaaagcagcccgggcgattaacaccaacgcctatcgtgttgcggcacaaatgggtacgaccaccacgacagttgcggcaatgaccacaggtgatatggccttcgccagaaacgcgatcgccgatcttgaagcctttcacttcctgaccaatacctaccacttcaccgacatattcatggcccacgaccatcggcaccgggatggttttttggctccactcatcccagttatagatgtgaacgtcagtcccgcagatggctgttttacggattttaatcagcagatcgttatgcccgagttccggtacaggaacgtcggtcatccagatgccctcttccgctttcagtttggataacgctttcatctcacatcctcaggcgataacgcccagttgtttaccaatacgcgtaaatgcttctactgcacgcgtaatttgctcaggggtatgcgccgcagacatctgggtacgaatacgcgcctgacctttcggaacgaccggatagaagaaaccggtaacgtaaatgccctctttttgcagctcacgggcaaatttctgcgccactaccgcatcaccaagcatgaccggaataatggcgtgatcggctcccgccagggtaaagcccgccgcgctcatttgctcacggaactgacgcgcgttcgcccacagacggtcacgcagttcgctgcccgcttcgaccatctccagtactttgatggacgcggcaacaatggccggtgccaggctgttggagaacaggtacggacgagaacgctggcgcagccactcaaccacttctttgcgcgccgcggtataaccaccagaagccccgcccagcgctttaccaagcgtaccggtgataatatcgacccggcccatcacatcgcagtattcatgggaaccacgaccattttcaccgacaaaaccgaccgcgtgggagtcgtctaccatcaccagggcatcatatttatctgccagatcgcaaacgcccttcaggttggcaatcacgccgtccatactgaacacaccatcggtggcgatcagcacatgacgcgcaccggcttcacgcgcttctttcagacgtgcttccagctcctgcatatcgttgttggcatagcgatagcgtttagctttgcacagacgcacaccatcaataatagacgcgtggttcagtgcgtcggagataatggcgtcttccgcacccagaagcgtttcaaacaggccaccgttagcatcaaagcaggaagagtagagaatcgcatcttccatccccaggaaggccgccagtttttgttcaagctctttatggctgtcctgagtgccgcaaataaaacgcacgctagccatgccgaaaccgtgagaatccattcccgcctttgccgccgcaatcagatcaggatgattcgccagcccgagatagttgttggcacaaaagttaatgacgtggcttccatcagccacagtgatatctgcttgctgcgcagacgtaataatgcgctcttctttaaacaacccttccgcccgtgcggtttccagatcgttggttaactgctgataaaattctccacgcattgcgattctccagacagggcaaattccagcacatattacccaaacttataggtcgcgacgagataacgcgttaacacttctgcaaaattcaggataaataacgtgtaacttgatgtctctcaacacctacagatagtagaaaaactgtacagttttggctgggcataatgatgattgattttactgcattgatataaaaagaaaaaatgatgccaaagcatcatttttcctatctcagttggtatcaaaacgctacccactaatggagggaaacttattttctactaaggaaaattctcagcgcctgcatttttgcccctaaagtgttactcctgaagcagcgaaacaaatcgaaccattttcctctccccagatagtttaggttgaagagatcggggcgtttgtaatagcacatgacaaaaatgccctggtcatcgtccacaatgttattatttagtgttattttttgactttccagaactaatttatagaattctttccatttatgctgactaccaacaattgcgcccccaataatatatacatgattgccaatcatgaaatcaaaaacctgttgttgagatgtgacagtaagccctttttttatagtgaaaagatgcatcttactttcatcaaatgggaaatcccaaattttcaatcctcgagttacatttggcttatggcaatagccaaaatctatccacgcaacaagaggcgttttcactaagcccatgttgatagctttatttacaaaataggccttaaggttacataccaaaacatactctggactccagtactctgggttttttaattgtcgaggctcaagtctatttgtaaagctctcatctttttgaattttttcgatacgacttctgatatatctaaatttcttttttatatcgataacgataaccgttgttggttttccgttgcgaatcgcttcaacccttggtttcaaatcgggagaagtgaaaataatcatctcattttcaagtgcggccagacgctcaaagtaactaaaataaacatcaacactacgagctagtttttcacggaaccctttattagcagtccaatcccctctaccaatgtcaaaatatgcagtgataattgtggtggaacttttcattactaataagaccattaatataaaaaaagaattatatcataaatattaatagaatgtatactgtatattatccattcaaatgcttccgttatttatcatacatcggaatattgatactaaagcactattcacatgcaaaaccaacatccgccatgaaggactagctaaaacccaaactagtttgttgcaattagcatccttgcacctctatgtaaagggctgaagggattcggatgtgatggtatgattacagacattcgtgtctgagattgtctctgactccataattcgaaggttacagttatgatcatcgttaccggcggcgcgggctttatcggcagcaacatcgttaaagccctgaatgataaaggcatcaccgatattctggtggtggacaacctgaaagacggcaccaagtttgtgaacctggtggatctgaatatcgcagactatatggataaggaagacttcctgatccagattatggctggcgaagagttcggcgatgtcgaagcgattttccacgaaggcgcgtgctcttccaccaccgagtgggacggcaagtatatgatggataacaactatcaatactccaaggagctgctgcactactgcctggagcgtgaaatcccgttcctgtacgcttcttccgcagccacctacggcggacgcacctccgactttattgaatcccgcgagtacgaaaaaccgttgaacgtctacggttacagtaaattcctgtttgatgaatatgttcgtcaaatcctgcctgaagcgaacagccagattgttggcttccgttatttcaacgtttatggaccgcgtgaaggccataaaggcagcatggcgagcgtcgctttccatctcaacacccagcttaacaacggtgaaagtccgaagctgtttgaaggtagcgagaacttcaaacgcgacttcgtctatgtgggcgacgtggctgatgtgaatctgtggttcctggaaaatggcgtttccggcatcttcaatctcggtactggtcgtgcggaatccttccaggcggtagctgatgctacgctggcttatcacaagaaaggccagatcgaatacattccgttcccggataaactgaaaggccgctatcaggcgttcactcaggcagatctgacaaatctgcgcgcggcgggttacgacaaaccgttcaaaaccgttgctgaaggtgtaacggaatacatggcctggctgaatcgcgacgcataagagctctgcatgaaaatactggtgatcggcccgtcttgggttggcgacatgatgatgagccaaagtctctatcgcacgctccaggcgcgctatccccaggcgataatcgatgtgatggcaccggcatggtgccgtccattattaagccggatgccggaagttaacgaagctattcctatgcctctcggtcacggagcgctggaaatcggcgaacgccgcaaactgggtcatagcctgcgtgaaaagcgctacgaccgcgcctacgtcttacccaactccttcaaatctgcattagtgcctttcttcgcgggtattcctcatcgcaccggctggcgcggcgagatgcgctacggtttactcaacgatgtacgcgtgctcgataaagaagcctggccgctaatggtggaacgctatatagcgctggcctatgacaaaggcattatgcgcacagcacaagatctgccgcagccattgttatggccgcagttgcaggtgagcgaaggtgaaaaaagttatacctgtaatcaatttagccttagtagtgaacgtccgatgattggtttttgcccgggtgcggagtttggtccggcaaaacgctggccacactaccactatgcggagctggcaaagcagctgattgatgaaggttatcaggtggttctgtttggcagcgcgaaagatcatgaagcgggcaatgagattcttgccgctttgaataccgagcagcaggcatggtgtcggaacctggcgggggaaacacagcttgatcaagcggttatcctgattgcagcctgtaaagccattgtcactaacgattctggcctgatgcatgttgcggcggcgctcaatcgtccgctggttgccctgtatggtccgagtagcccggacttcacaccgccgctatcccataaagcgcgcgtgatccgtttgattaccggctatcacaaagtgcgtaaaggtgacgctgcggagggttatcaccagagcttaatcgacattactccccagcgcgtactggaagaactcaacgcgctattgttacaagaggaagcctgacggatgcgggttttgatcgttaaaacaagcagcatgggcgatgttctccatacgttgcccgcactcactgatgcccagcaggcaatcccagggattaagtttgactgggtggtggaagaagggttcgcacagattccttcctggcacgctgccgttgagcgagttattcctgtggcaatacgtcgctggcgtaaagcctggttcagcgcccccataaaagcggaacgcaaagcgtttcgtgaagcgctacaagcagagaactatgacgcagttatcgacgctcaggggctggtaaaaagcgcggcgctggtgacgcgtctggcgcatggcgtaaagcatggcatggactggcaaaccgctcgcgaacctttagccagcctgttttacaatcgtaagcatcatattgcaaaacagcagcacgccgtagaacgcacccgcgaactgtttgccaaaagtttgggctatagcaaaccgcaaacccagggcgattatgctatcgcacagcattttctgacgaacctgcctacagatgctggcgaatatgccgtatttcttcatgcgacgacccgtgatgataaacactggccggaagaacactggcgagaattgattggtttactggctgatagtggaatacggattaaacttccgtggggcgcgccgcatgaggaagaacgggcgaaacgactggcggaaggatttgcttatgttgaagtattgccgaagatgagtctggaaggcgttgcccgcgtgctggccggggctaaatttgtagtgagcgtggatacggggttaagccatttaacggcggcactggatagacccaatatcacggtttatggaccaaccgatccgggattaattggtgggtatgggaagaatcagatggtatgtagggctccaagagaaaatttaattaacctcaacagtcaagcagttttggaaaagttaagtagtttataaaggtaaaacatgctaacatcctttaaacttcatagtttgaaaccttacactctgaaaagtagtatgattttagagataataacttatatattatgtttttttagtatgataattgcattcgtcgataatactttcagcataaaaatatataatatcactgctatagtttgcttattgagtctaattttacgtggcagacaagaaaattataatataaaaaaccttattcttcccctttctatatttttaataggcttgcttgatttaatttggtattctgcgtttaaagtagataatagcccatttcgtgctacttaccatagttatttaaatactgccaaaatatttatatttggttcttttattgttttcttgacactaactagccagctaaaaagtaaaaaagagagtgtattatacactttgtattctctgagttttctaattgctggatatgcaatgtatattaatagcattcatgaaaatgaccgcatttcttttggtgtaggaacggcaacaggagcagcatatagtacaatgctaatagggatagttagtggcgttgcgattctttatactaagaaaaatcatccttttttatttttattaaatagttgcgcggtactttatgttctggcgctaacacaaaccagagcaaccctactcctgttccctataatttgtgttgctgcattaatagcttattataataaaagtcccaagaaattcacttcctctattgttctactaattgctatattagctagcattgttattatatttaataaaccaatacagaatcgctataatgaagcattaaatgacttaaacagttataccaatgctaatagtgttacttccctaggtgcaagactggcaatgtacgaaattggtttaaatatattcataaagagtccttttagttttagaagtgcagagagtcgcgctgaaagtatgaatttgttagttgcagaacacaataggctaagaggggcattggagttttctaacgtacatctacataatgagataattgaagcagggagtctgaaaggtctgatgggaattttttccacacttttcctctattttagtctattttatatagcatataaaaaacgagctttgggtttgttgatattaacgcttggcattgtggggattggactcagtgatgtgatcatatgggcacgcagcattccaattatcattatatccgctatagtcctcttactcgtcattaataatcgtaacaatacaattaattaagaataaacaagtttaagaagtgagttaaaactcacttcttatctatacaacttaatctctttacactattagttaaagtttcagtatcgatatcttttaccgtatatgttggggatactatttgtatagatttatgatgattcggggaccaaattaaatggctgggatattccggagtacgactattagggtaaaatgcaagcgttggtttatgataagccgcagcgatatgaacaagagctgtatcaacagaaatgacaaaatcactatacttggtcaacgcaacggtataaataaactcatcaaatggtagtgtttcgatttcaagtattggtattgtcaataaatcttgcggtaacccggtaaatataatccgataattttcaaagtgtgttttcacttcttgatatataacttttatttgctcaaacgtaagacggcatattttttttgcacctaatggattaataatgactattcttgtatctccaataaattcttttattttatcttcaacatctactggtaaatgcaagtcgtagttggtggaaaatttaccctcaccataaatatgcttcagtatttctattgctcgtgtactcatatgttcttttaaacattcatcgtggggatggtaaaaactatagtaacgcttataccaatgatcaaaacccagaatgtaagaatcttttaaactacttaatattaagctatgcttaaaactgggcatagtttcaaaggggtctaatacaatatcgaactgtaaatcccgcagatgcttacatagagtaagcatttcaagaaaaccggtactttctttaatacagaactcaaatatatttttattattagagagaaattccccaccctttctatttgtgagaagagttattttaacccctttactataaagttcacgataaatgctacttaatacaattagatcaccaagtttattattatcatgaataataaggcaacttttaacttgtgctggatctgtaatttgattatttattttattacgaaataaaaaagaaaggaaattaatcttgattttgtttatataaaatcttttctttttgtgaaaagttcctaagcgcatttttataccatattattttagtttcaggatgattaattagcataagaatcggtactagttctatattgcattttttttcttgtcatatctttactttcttctgcactgatgtcttgaagtttaataaatggaattacatcgtaagaaatagctgtatcatcacttaaattataaatattaatatcttttacattatcatgcataaaacgaaaaaatggcaatattttgaataaatccctacttaattcgctgggcatgggatttttattctcatcatagaaacgagaacagctacccgttaaatcaagaccagaacaaataatccgcgcatacttaagactatatgcgatttgaattgcagcaaaggcaatagtatggcaactgcaataaccaagactaatgtccttgcaaaatccaaccagacgaccttttttagacaacggtacagagatcagcagttctttgtgaatctgtctcaaaatattaaatttaatcttctttataaaaccacctttttcccgacggtaaaaggaccgtaatacgaggcagttctggaggatataaagtttatcttctttggaagcgtgttcataaacgtcaacgtttactatggtataacgacttctctggctaaatttataaaaatcatcacgacgctgatgtaaaaatcggacatctgtaagtacatatataaaaggaacgatattattacttaacagatattgcgcagaaccattgacagcaataatatcctttgttcgtaatacactcaaaggtgttttttggcttgtagggccgctaagaaaaataataacatcatcagatattttattttcaatcaggttttcaacatcttttttgtcaatgtatctaatattcttcatgataaacctgtgaaataaataactccgcttaaaactgtcctggtgaagacatgtaattgtgggattttttttagcgcgctggtttccctttcaaacgccgcataaaattgcgcatttttttacgatatactaaaagataatagcctagatctctaatctcatttttaataccgtaatgacgctctaagtcaatacgatctttcgctttacgctgcgcactagcacgctttccggagagatcgataattcgaacctcaccattttttataatgaagttaccacgatgggggtcgccagaaaccatgccatgttgatgtaaggcattaatactttgctgaattttattttttagcgcatcatcaatatcgggcatatcacacaactctatgccatcaatatactcgatgatcatgatataagtatggacaaaacgtaaggttttccgttcagccaataaataaaagtcattgagtgtatttaacccttcatttcgtactttttgggtttgctcaaaaaggcgttcgtaataatcaccttttaacagagacttaaagaaacgttcgttacgcttaactttcggagaaaaaaccttaagaatcaatttaccgtaatcggtatcaataagcataacttttgtatcatcaatagaacgaaaaaccttgatgatatttatattataagacaagaagtcatttaatacattgaggtacttactattgttttcatcggtaaaaacaaccaagtctttgatcttgctcttctgaatcataataaaccagttaaatgttatttacggtaatattttcggcaaagataacagactcctgctataattcctgagatataatgatgttgcactaaaagatgtttatatcttttttaaattcaataattgatttcgcatctcgtggagagtcatctttccagggggaattttctaaagctattttatagtattttaccgatggataaattgcccatttgtgccacggtttagttgcacctgtataatgaataagaagagtactttctgtaatcagctttttatagttttgatgtgttttgtcttttaattcacttttaattgtataaattgtattgtactcacgaggcaaaaataatgtcatccctttcagtaagacattcataacatcctgatcagggtatttataaacattatctttactcataagaatagacaacgctttttctgttagttttgcgtcagcccattttcttaagtctaaataaacgacaccggaattaaagtactgcccaagtaattcaggatcagacaacctggataccgccttttcttgcattggctcaacatctttaacaacagcagcaaccgctccatttaaacccagatgtaatagttggctaatatcgcctttacaaacaacatctgcatcaagataaagcaaacgatcaagcgttaaacccaataattgaaatgcaaataaacggaagtacattgctcttgaccagacctgtgtacaaggcaagcactggagcttatcagtgttaattctatataacgtgattcttaattggttttgctctgcaagctttgcaattttttgaaaaaaaccatcattataaacatcagcaataatataaaaatcaagattaatatgtcgattatttaggacaattgatgtgatggaaacacctacaccatcaagataattagcatcgacaccataggcaacatttaaacattcagaagtatttatattagctagccgaaaatcccaggctttaactttatctatctctatggcaggaaatgagtccacaatgctacccttatatcattactttatagtttcccagttttaatgctttatcttttcaataaaataaaaaagatagttgctaaatccttttagatatctatgctttttaagcatatgttttgcgctatatcttaattgattgctattgttcggtttcagcaacgccgtattcttccatgggctagcattttttgcctccataaaggcttgacttacaggataatcccaggcccaatcatgccagggcttggttggcccgatataatggataaaaatagtatcgttggttactgggtttataaagctttctttgagttgataatttaagctgaactgggtgttatatttaatatcagcgaaaataagtttatccgccagcaacatatttaacacatcctgatcaggatgtgttatttttttgattatttctggctcatttagcattgcaatagctcgtgcagaaacctgctgagccgcccattgggcagtattaatcaataaaaaaccggagttaaagtaacctttagcaattcccgcaacacctaagctatgggcgcgtttttcccaccagtcagcttgcccttctgtaacaaccattgcgactttatcgtcaggaaaactgaaattaattagtggctcaatagtcccctgacaaatgatatctgcatccagataaaggactttaggcgccttattaataaagtaatctgcaataacaaaacgaaaatatattgcatgagtccaattcttagtgctaggcaaactgcgcagtcgatcaccattaatcagatatattttaattctggttttatactgcaacgccagggcatcaaaatacttacgatcatcatcaccaaaataatcagtaaaaatatggaaacacaatcgacttccttcattatattttaatatactagcaatgctaattccgcaaccaaatagaaagtttttgtcagttccataagcgatgtccagacaaagattttctgtttctactttatgatcataatcaataacactattaagaaactcagtttcctggaaaaacacctgctgcattatttcctccgggaaatagcagaaataattaccttatgtaatctatcgtaatacttgctttggtaaaattcatcgatgctcgcaggaattttttcatgttcgatatgaatttcacctgctatatatttatttagaagagttacaaaaccagcaatatctcccggttgatacagatggccattgacatcaggttgaataatgtcagcaggcccggagacacaatcggcactgatacaaggaatcccccagctcaaggcttcaagtagggtcattgggaaaccttcaaaagaactcgtgagcaataacgcactcactttttcaatatcttgctggaccaattcccagggatattgttgccaaccataccagacaattcgatcatcaatatttaattctctaccataagcctggcatttttcgaaatcggagccatcacccaatacatggagtttccagttacctttcgcttgacttaagccatcaagcaggtctttaactcttttctggccttcaaatttcatacgcccaacataaataaacgttgccgtttcaccttcctcgggcgcgggaatgacactgtctttagtttcgacgggattaaaaataacatttatcgtgctttctgctacacctcgattaatcatttgctgtttaatgccagagctgattgctaaatgatagtcggcacaggtgatatattcagcatgttttttgtgatctaaagaaaaatgtggccaactaaatactggcatatcaattccactttttttacgtgcttttgcggcaaacaggcaggagatcacatcaatacaaataacgatatctggttggtactcctgaagccatttacttagagcatgaatatgtttcgcccgacgcaaaaaacctaaacgaatattggaaaaactacaactgtatttaataccttccagccatcccttatccattttgtcattacgacaaaagaaaaacatttcactttggatatgttgttgcctgaaggtagtaataacatcacggatgacagtttccatgccgccaaatccagaaacagcttcgccgataaacgctattttcatagaaactctcattaattgagtaaaactcactgttttaacggttttatttgtctataaaatcagaaacaatcgtactcatcattttatctggactgaatttatataaactatcataatccattggtttaacagaactgttaataaaatactctaacttatcccaatcatcatgacctattataaaaaagcgagattcactatagatttcactaccaaatacatttatattattagtaattaattttttattgaaaaatagtgcctcaagtatacgaagagtccagccagattggttttctttggttatatcaacaattatattagcatttaatgttcttctaatattctcttcataagatatttgtttttcaatcaaatacttactagtcgtagaacttgtcttatctttgacaacattaaaatctagcttacatcctagtgttgttaatctctcggctaactcattaattatttgaagacgccctttatcacgaccaaggaaaaaacatattggctggctgttatttttgtcagataaactataatttctaatttcatccattcctataggaaaaaattgttctattgccttgatcttttcattccctataaatctatgctcaaaatcatatataatatcgaaataattcgcgttatcaagaataaaatcttcgccaacagtatttcttagaagcaaaactttatgacagttaatattttttaatatttgtttattgatacctttattaacaacactgtcattaatgataattatgtcatcttttttaatatcattgaggtaatgcttgatgaataatcgccccagccatgcattatccatccctattttacttatttttttattaatccagttatatttttttggtgttgttatattttttatcttgtacttttttttcaggtactgaatcatttttaattcataatctgcaacccaatttataaaataaatagtcataataaagttagttccagtacatactaataaatatttttataatcctttgcgttgtgttcgctctttaatacgctcggccttaacgcttgccatgttcaataaattctgttcaagagacaatattttgcgtaaaggcatcccaaaataaaccttcataaatcgccagatatctctttgcgtcaggccaatattcatactactgaaatataaaccaatcaggtctttatcgcgccagcggcgcggtacttttgcacgtatctgtgcccgatgcagatcgataacactaatttttaattcatcttcccggccagtaaatggcaaatgaagcaaaaagtggcaaatgtaacagtcgcggtgatttatccctgcagtatgcattttacgcaccatagttgctacacgtgcgatcagcatacgcttaacacgtatatcaggcgggttgactgcccaatcggcacaataatcttcaaggctaattgtgggagtgagatcttcggtaataataaaacttgcgcgagttaatggatttaaccctttttcgccaaacccaatgcccttcattgtatcaacgccaacatcactcaggcgatgaatagcgtgccactctctgtctgcgcccaaaacgggcatccgcaaactgagtagattttttataatctcttttaatgtcgtccccttgtgccatttaagaaaatagcttttcccggacagttcaaagcgtaatgtacgacgagtctccagttcacgaaagacctcgccgttcagttttttgacctctgcaaaagcatctttaccacgccaaagtgtggcaagcggctcttttaattcaaccatctaaaccacctgtaatgatatccgcggctttttctggcaagctatacaaatcctgagtatcggcataatggcgagcattctccgcccaggccattcgcaatgggctctgagttaacgctttacgtaaaacttcatttaattgttcctgagagaaaggttcagcgatgaccgttccacaattggcatccgcaatataatgcgcgtacccacataccgctgttgttaaaacaggtaacccagcagtgatcgcttctagaagaacgatacccgcggcttcctgataagcgggatgcagtaataaatcagcggctgccattaattcactcacatcattgcgaccgaagaagaaatgcacattgctccgcacgccgagtttttctgccagcgcttcaaattttcgcggcttatcctgaccaacaacaaataaaagcgtattgtgacgtaaactttccggtaagcttgccaaagcttcaatactgcgatctacacctttacggccaaaatcacttccaacctgcagtaataagttttgttgctcttttatgccatttttctggcgataaatttcacggctgtttgggatttgctcactgtattttctgtccggataaataccgggaggaagaatttgaaaacgttcaggttcagtttgataatgcttctggaaatcggcgatttgcttatcggtcagcatcataagtttcgtgcttttaccctgctcgaaagtcgctcgctcaaatgcggcataatggcgatatcgacttgttaaacgatataaaaaacctttttcttgcgcaactttctcggcgtaacaaacatcagcggcaaaataaacatccaggccaggcatcttattaaacccaacaacgcgatctgcgggatgctctttgagatgattttgtacccaggcataatattctgcattgcgtccatggttggtatgggacttaactggcacctgaataagctcaaatgctttcgggcaatcgccttcccagctctgtgtatatacccgaacatggtggccccgtgcggcaactgtacttgcaatgcgcataaagtcacgttgaagcccaccaaatggaaaatatttatataaacaaaacgccacgatcataattgtgcattcctgtcagcactaggggcatcttctggcaacagcttttccgtagcggcgatcacatcctccgctgggataacagaaagatattttttgttgcggtcaagttcatgccgggtcggcattttctgataattccccgcccagaattgaataatattctcggtccagggacgccagaatacgtgatccgttgcaccaaatagactaatgactggcgttttcactgccgctgcaatatgtcccggcgcagaatccacaccaataaaaagcactgcatgatcaattaatgcacccagttcaggaaaacgtgttttacctgcaaggccagtaatgggttttgtttcgcaacctcgtgcaatctcatctacacaagcgagatcatctgcgctgggcccacaggttagcacaacctgatagcctcgctgttgcagcgcatcgataaccttagaaaatttatcgttatcccaacacttaaatatctgacgcgctgtcggttggatgacaacataatgatcttttacgcccagggcatctaattcccggcgcatcttcttccagcaatcttcggcgtaactcattgttgtgtcggtgtagaaatcggtaatacctaatggctcaaggacgcttaaattacgctcaacaatatgtgtaccgtgtattggcgctaagtgtgtgaagctttttttccaaataccatgctgccgatgaccataaagttggcttattttcatccgtgcaggtaaacaacgtaccagcagcgccaccatccactgatccgtaagattaatgaccaggtcataattattcgcacgcagagtttttatcaagctaagcacatttttaattttatcgaaagttcccgcacctttattgcttatcccatagagcgcattaatttccgggttttcagacaaaatagggatggtgtcctgataaagcagcatatcgatttttgcatcaggataattctgcttgagcgtactgatgacaggagtagttaataacatatccccatgatatcgcatctttatgaccaggatttttcgaaatggcttttccactagcgactcttttgtgtgattgtctggttaagttaagcagaaaaaagcacgctaccgccccaggctcaacagctacctgaatactgataacgcacttactttgacgtgctagtgtatcatttctttcgcagcaatccgacccgaatgatttttatacacaaaatatactttaatcataaaaatcaaatagataaaaaatagcatttcgataatgtcagtacggcctatgtagatttgaaaatggggccgagtttcaatgaatcgcataaaaatacaaaaaaaatgaagatgtagcggcagatcagaccaaactgaagctatttaagtcaaaaacgggaaaagtaatggtaaagccacagctaaatacatagaatccccagcacatccataagtcagctatttactatgctcgaattgctttacaccgcccttctctaccttattcagccgctgatctggatacggctctgggtgcgcggacgtaaggctccggcctatcgaaaacgctggggtgaacgttacggtttttaccgccatccgctaaaaccaggcggcattatgctgcactccgtctccgtcggtgaaactctggcggcaatcccgttggtgcgcgcgctgcgtcatcgttatcctgatttaccgattaccgtaacaaccatgacgccaaccggtagcgagcgcgtacaaagcgctttcgggaaggatgttcagcacgtttatctgccgtatgatctgcccgatgcactcaaccgtttcctgaataaagtcgaccctaaactggtgttgattatggaaaccgaactatggcctaacctgattgcggcgctacataaacgtaaaattccgctggtgatcgctaacgcgcgactctctgcccgcagcgccgcaggttatgccaaactgggtaaattcgtccgtcgcttgctgcgtcgtattacgctgattgctgcgcaaaatgaagaagatggtgcacgttttgtggcgctgggcgcaaaaaataatcaggtgaccgttaccggtagcctgaaattcgatatttctgtaacgccgcagttggctgctaaagccgtgacgctgcgccgccagtgggcaccacaccgcccggtatggattgccaccagcactcacgaaggcgaagagagtgtggtgatcgccgcacatcaggcattgttacagcaattcccgaatttattgctcatcctggtaccccgtcatccggaacgcttcccggatgcgattaaccttgtccgccaggctggactaagctatatcacacgctctagtggggaagtcccctccaccagcacgcaggttgtggttggcgatacgatgggcgagttgatgttactgtatggcattgccgatctcgcctttgttggcggtagtctggttgaacgtggtgggcataatccgctggaagctgccgcacacgctattccggtattgatggggccgcatacttttaactttaaagacatttgcgcgcggctggagcaggcaagcgggctgattaccgttaccgatgccactacgcttgcaaaagaggtttcctctttactcaccgacgccgattaccgtagtttctatggccgtcatgccgttgaagtactgtatcaaaaccagggcgcgctacagcgtctgcttcaactgctggaaccttacctgccaccgaaaacgcattgaggttgttatgcaaaaacgggcgatttatccgggtactttcgatcccattaccaatggtcatatcgatatcgtgacgcgcgccacgcagatgttcgatcacgttattctggcgattgccgccagccccagtaaaaaaccgatgtttaccctggaagagcgtgtggcactggcacagcaggcaaccgcgcatctggggaacgtggaagtggtcgggtttagtgatttaatggcgaacttcgcccgtaatcaacacgctacggtgctgattcgtggcctgcgtgcggtggcagattttgaatatgaaatgcagctggcgcatatgaatcgccacttaatgccggaactggaaagtgtgtttctgatgccgagcaaagagtggagctttatctctagtagcttggtgaaagaggtggcgcgccatcagggcgatgtcacccatttcctgccggagaatgtccatcaggcgctgatggcgaagttagcgtaacgtttatgccggatggtatgccatccggcgcgcatgaattacttctggcactgccgacaataaaacgttgcccgctgcgcatgtttagtcgccacaatcggcgtaccgcacacccgacacggctcaccttttcgcccgtaaacctgcaattcctgagcgaaatagcccggtttaccatcactttgcagaaaatctttcagcgttgtaccaccctgctcaatgctacgcagcaacaccgctttaatcacccgagctaacaattcacactctgccaggctcagactactcgccagccgatccggatggatccccgccgcaaacagactttcgctggcatagatattccctacccctaccaccagcttgttatccatcagccacggtttaatcgccgtttttttcttcgcgcacttctgatgcagatactcaccattgaaatcgtcgctaagcggctccggtccaagatgggtcagcacattatgcccttccagctctttggtccacagccaggcaccaaagcggcgcggatcggtgtagcgcagcactttgccgttgctcatcaccaaatccacatggtcatgcttttcagggggaagttcttctggaaggatgcgcaggctgccagacatccctaaatgaatgataatccagccctcaggcagctccagcagcagatatttagcccgccgctgcacgctaagcactggttggtcgcttaaacggtagatctcttcactaaccggccagcgcaagcgtccgttgcgcaccactgcatgaagaatggttgcaccaacgagatgcggttctatgccgcggcggctggtttcaacttcgggtaattcaggcatagcatctccaggaatgaacagatgcagtcaatatgggggcaagcagataacaaaaaaccccgccggagcgaggttttttgttacatcaaagcgagaattatttgattttcgcttctttgtagatcacgtgctggcgaacaactggatcgaattttttcagttccagtttttccggcttagtacgtttgttcttcgtagtggtatagaagtgaccagtaccagcagaagaaaccagcttgattttctcacgaatacctttagccatgatttatttcctctaagtacttagtacttttcgccacgggcacgcagttcagccagaactgtatcgatgccttttttatcgattacacgcatacctttagcagatacgcgcagggtgacaaaacgcttctcgctctcaacccagaaacggtgagagtgcaggttcggcaggaaacggcgtttagtcgcgttcagtgcgtgggaacggttgttaccggtcaccggacgcttgccagtaacttggcagactcgggacatgtctattctccaaaaatcaaattagctcgagcttcgtatggggtattggcgcctcgtcaggctttacagcccggtcatcgcagttctatgtgaactctcgattgccaggcccaaatgccaaacccgagattctcaaaggtggcgtagtatacgctgactcagcgatgtgctcaagtcccgaacagacaaagatcccgaaggatcgcgcatagcgggttaaatccagccgcgttcggcaaaagaaacatactctccacgcccaatcacgatatggtcgagcacgcgtaaatccatgaactgacaactctttattatccgttcagtaatgagtttatccgctttactgggttcagcacaaccgctagggtgattatgtgcaaggatcagcgcgctggcgtttatttttatcgcttcgcggataatttcccgaggatggacttcaacatggtttagcgtgccggaaaaaagacgcctatgcgttataacccggtgttgggagtcgagaaagatcaccataaagatctcccgctcctcacccgtgagctggctttgtaaaaattccctcgtcatctccgggctgagtaaagggctttcttcacgcatccgcacgttgtagtaacgccgcgccagttcagcaatcccctttaactgggcaaatttcgccacgccaattccatgaacgccactaaattgttcatattcagaggttaacaagccataaagagagccgaaattctccagcatctcttttgccagggttaatacatctttaccgcgcgttccggtacgcagaaatagcgccagcagctcgacatccgttaaggcgctaataccaaacttcagcattttttcgcgcggcatcaacagctgactattgtttttcaccttcacctcctttgtggtgctcgcatcctgtcatagccgtttcgttaaatcgacggccagttttcaatcctggaaagcgcctcgcaaagtgaatctcaggtgaaggcacgacaacaaaagtattgtgataaaatcgccaacttctggtgtcaccctacaggaaaaatcatcatgagcctggccggtaaaaaaatcgttctcggcgttagcggcggtattgctgcctataaaacccctgaactggtgcgtcgtttgcgcgatcgcggggccgacgtccgcgtagccatgaccgaagcggcaaaagcctttatcaccccacttagcttgcaggcggtttctggttatcccgtttccgacagtctgctggacccggcagccgaagccgctatgggccatattgagctgggtaaatgggctgatttagtgattctcgcccctgccacggcagatttgattgcccgtgttgctgccggaatggcgaatgacctggtaagcacgatttgtctggctacacctgcgcctgtagccgtgctccccgccatgaaccagcagatgtaccgtgccgctgccacgcagcataatttagaggtgcttgcttcccgtggtttgctcatctgggggccagacagtggcagtcaggcttgtggtgatatcggtcctgggcgaatgctcgatccgttaaccattgtggatatggcggtagcgcattttagccccgtcaacgacctgaaacatctgaacattatgattaccgccggcccgacgcgtgaaccgctcgatccggtgcgttatatctctaatcacagctccggcaagatgggttttgctatcgccgccgccgctgcccgtcgtggcgcgaacgtcacgctggtaagtggtccggttagtctaccgacgccaccgtttgttaaacgtgttgatgtgatgaccgcgctggaaatggaagccgccgtgaatgcttctgtacagcagcaaaatatttttatcggctgcgccgccgtggcggattatcgcgcagctaccgtggccccagagaaaatcaaaaagcaggccacgcagggtgatgaattaacaataaaaatggttaaaaaccccgatatcgtcgcaggcgttgccgcactaaaagaccatcgaccctacgtcgttggatttgccgccgaaacaaataatgtggaagaatacgcccggcaaaaacgtatccgtaaaaaccttgatctgatctgcgcgaacgatgtttcccagccaactcaaggatttaacagcgacaacaacgcattacaccttttctggcaggacggagataaagtcttaccgcttgagcgcaaagagctccttggccaattattactcgacgagatcgtgacccgttatgatgaaaaaaatcgacgttaagattctggacccgcgcgttgggaaggaatttccgctcccgacttatgccacctctggctctgccggacttgacctgcgtgcctgtctcaacgacgccgtagaactggctccgggtgacactacgctggttccgaccgggctggcgattcatattgccgatcctagtctggcggcaatgatgctgccgcgctccggattgggacataagcacggtatcgtgcttggtaacctggtaggattgatcgattctgactatcagggccagttgatgatttccgtgtggaaccgtggtcaggacagcttcaccattcaacctggcgaacgcatcgcccagatgatttttgttccggtagtacaggctgaatttaatctggtggaagatttcgacgccaccgaccgcggtgaaggcggctttggtcactctggtcgtcagtaacacatacgcatccgaataacgtcataacatagccgcaaacatttcgtttgcggtcatagcgtgggtgccgcctggcaagtgcttattttcaggggtattttgtaacatggcagaaaaacaaactgcgaaaaggaaccgtcgcgaggaaatacttcagtctctggcgctgatgctggaatccagcgatggaagccaacgtatcacgacggcaaaactggccgcctctgtcggcgtttccgaagcggcactgtatcgccacttccccagtaagacccgcatgttcgatagcctgattgagtttatcgaagatagcctgattactcgcatcaacctgattctgaaagatgagaaagacaccacagcgcgcctgcgtctgattgtgttgctgcttctcggttttggtgagcgtaatcctggcctgacccgcatcctcactggtcatgcgctaatgtttgaacaggatcgcctgcaagggcgcatcaaccagctgttcgagcgtattgaagcgcagctgcgccaggtattgcgtgaaaagagaatgcgtgagggtgaaggttacaccaccgatgaaaccctgctggcaagccagatcctggccttctgtgaaggtatgctgagtcgttttgtccgcagcgaatttaaataccgcccgacggatgattttgacgcccgctggccgctaattgcggcacagttgcagtaatatgacgccggatgacttttcatccggcgagtttctttaaacgccaaactcttcgcgataggccttaaccgccgccagatgttccgccatttccggcttctcttccaggtaagcaatcaggtctttcagggtgatgatagagatcactttgcagttgtaatcacgctcaacttcctgaatcgcgctaatctcgccgcgcccgcgttcctgacgatcgaggctaatcaacacgccagcaagcgtcgcgccattggcctgaataatctccatgctctcgcgaatcgccgttccggcggtgatcacatcatctaccagcattacgcgtccttgtaacgcgctaccaaccagattgccgccttcaccgtggtcttttgcttctttgcggttaaagcagtacggcaggtccaggtcgtgatgctccgccagtgccacagcggttgtggtggcaatcgggatccctttgtaagcagggccaaacagcagatcgaactcaatgccggaatccaccaacgcttcagcgtaaaaacggcctaacagtgccagatcgcgcccggtattaaacagcccggcgttgaagaaataggggcttttgcgcccggatttcagcgtaaactcgccaaactttaacacctgcttgctaagcgcaaattcaataaactggcgctgatatggtttcatgccttcgctcctcatcttacttttctacagacaaaaaaaaggcgactcatcagtcgccttaaaaatcagtttgccagcgccgccttctgcgtcgttacaatggattgctttcccctcgggccagagccaacaagatgagtagctcttcatgggtgaacggctcgccttctgccgtcccctgcacttcaatgatgcgcccgtcttcggtcatcactacgttcatgtcggtctctgcggcagagtcttcaacgtattccagatcgcaaaccgcttcgccgttcacaattccgacagaaactgcggctaccatccctttcatcggattggttttcagcttgccgttttccaccagcttctgtagcgcatctaccagcgccacgcaggcacccgtaatgctcgcggtacgcgtgccaccatcagcctgaagcacgtcgcagtccagcgtaatggtgaactcacccagcgctttcaaatctactgccgcgcgaagagcacgggcgatcagacgctggatttccattgtgcgtccaccctgcttacctttcgccgcttcacgagcgttacgggtgtgggtagaacgtggcagcatgccgtactctgcggtgatccagccctggccctgacctttcaggaagcgcggcacgccttcttcaatagaggcggtacacaacactttggtatcgccaaattcgaccagcacgctgccttctgcatgttttgtatagttacgagtcagggtaacgggacgcacctgattattgctacggcctgctggacgcatattgaaatctccggcttgaaacaaatgtggctgcgcattatacggacttccggcggttattcctatcctgacaaggcatcgatggctataatccttccacctctccttttataaacaggaacgtctatgatccgcagtatgaccgcctacgcccggcgtgaaatcaagggtgaatgggggagcgcaacctgggaaatgcgcagcgtaaaccagcgttatctggaaacttactttcgtctgccggagcagttccgtagccttgaacctgtcgttcgcgagcgtattcgttctcgcctgacgcgcggtaaagtggaatgtaccctgcgctatgagccagatgttagcgcgcaaggtgagctgatcctcaacgaaaaactggctaaacagctggtaactgccgcgaactgggtaaaaatgcagagtgacgaaggggaaatcaacccggttgatattctacgctggccgggcgtgatggcagcccaggagcaggatcttgacgccattgccgctgaaattctcgcggcgctggatggtacgctggacgactttattgtcgcgcgcgaaaccgaaggtcaggcactgaaagcattgatcgagcagcgtctggaaggcgtcaccgccgaagtggtcaaagtccgctcccatatgccggaaatcctgcaatggcagcgtgagcgtctggtcgcgaagctggaagatgctcaggtgcaactggaaaacaaccgtctggagcaggaactggttctgctggcacaacgaattgacgttgccgaagaactggatcgcctcgaagcgcatgtcaaagagacctacaacattctgaagaaaaaagaagcggttggtcgtcgtctggattttatgatgcaggagttcaaccgcgagagcaacactcttgcgagcaagtctatcaatgccgaagtgacaaactccgccatcgagctgaaagtgttgattgagcagatgcgcgagcagattcagaacatcgaataactcgtaacgccaattcttacttttccgccttcacaaatgccgccactcaaacagagcggcatttttcttccccgcaacattcaattctgttttgcgtgcctgctccagattttgcgatgtttttttgcccagcacactgagaacgcgagatactcacaactgtatataaatacagttacagatttactttctttgcaattgatatcacatggagtgggcaatgaacgaacatcatcaaccttttgaagagataaaactgattaatgcaaacggagcagaacaatggagtgcaagacaacttgggaaactactgggttatagtgagtatcgtcactttatacctgtattaacgcgcgccaaagaagcctgtgagaacagtggtcacacaattgatgaccatttcgaggagatcctcgatatggtcaaaattggcagtaatgccaaaagagcattaaaagacatcgtactctcccgctatgcctgttacctggtagtacaaaacggcgaccctgcgaaaccggtcattgcggcagggcagacttattttgctatccagacccgacggcaggagcttgctgacgatgaagcatttaagcaacttcgtgaagacgaaaagcgtctgtttctgagaaatgagttgaaagaacataacaaacaattggttgaggcagcacagcaagctggggtagcgacagctactgatttcgccatatttcagaatcatggttaccaggggctgtatggtggattagatcagaaagctattcatcagcggaaggggctgaaaaagaatcagaagatcctggatcatatgggtagtacagaactggcggctaatctctttcgagctacccaaacagaagaaaaactcaagcgggatggcgtgaatagtaaacagcaagcaaacaccacacactttgacgtgggtcgcaaggtgaggcaaaccattcaggaacttggcggaaccatgcctgaggagttgccgaccccgcaggtcagcatcaagcagttggaaaacagtgtaaaaattacagagaagaaataacagaaactaaaaactctttttgttgattgagacacccgatgcgtaagccaaggtccaggtgcagtgaacacaatggctaaatattgcacctttcttttccccctcagttttaacctattttttcttatgcattttctcagacaagaagtcagaagaatgcatctctgctacagaaaatagcgatttcacataactacaagttatcaatttcccctccccttaaaaaatctcaatcgtgacaatgcgcacaaatcgctaccctgccagacagatttttagggagagaaccatgctgttatacattttgtatttggttggcattactgccgaagccatgacgggggcgctggcggccggacgacggcgcatggatacatttggcgtaattattattgcgaccgccaccgcaattggcggagggagtgtgcgcgatattctgctgggccactatccgctcggctgggtcaaacacccggaatatgtgattatcgtcgctaccgccgcagtactcaccactatcgttgctcctgtaatgccttacctgcgcaaagtgtttctggtgctcgatgcgctcggactggtggtcttttctatcatcggggcacaggttgcactggatatggggcacggcccaattattgccgttgtcgcggcggtaaccaccggcgtgtttggcggcgttttgcgcgatatgttctgtaaacgtatcccactggtattccagaaagagttgtatgccggtgtcagttttgcctccgccgtgctgtacatcgcgctgcaacactatgtttctaaccatgatgtggtaattatctccaccctggtattcggcttttttgcccgcttactggcgctacgccttaagctgggattaccggtcttttactacagccacgaaggacattaaggttcaaaacctgtgatctgctgggcagccagccaactgcccagcttcttgatttgcgcattttccttccattcaataacctgtctggcgcgtccgcttccagtccccggcagctgctgccagaactgctccgtgctaaataaaagttggctccaggaccgttcatcactggcattaagcgccgcccgggttagcggtattcccattgccatcacccagcgagtaaaaggctgcttacgagccagattaaactgatgccatagctgcgcacttttacttttcgcgatccccggcgtgttctgtaattgctctggcgttaataaaagccaggaaaagatatgttcaaagcgatgagtctgatgcagcgcgcgccaaccggcctcaccaatgccatccagcccaagaacctgttttgcccccagccagactaagcgactaatgaactgttcctgacaaacatcagaagcaaagtagcaggtcaagctgttaaagcggttttctggcggtgtcggttttgtacgttctgcaccgcgccacaccacatcatcaatgcgaggaataccctgaccggcaaggctgacgagaatctgatcaccaggcgcaatatcccactcctgccagcgcctgacggaaccaatattcacccgctggacttttttatcatccagcatgacaggtgcgagactcgcaaccacgcttattttaccgctcttacccaccgcaaactgaattgccttcacttcggcaacctgagctacaggttgatatttccaggccaccagccactctgcctggcccggtagccaatggcgggattctggctctttcgccgctcgtacaactacgccatcggtgacgaagggtaattccgctttccaccactcattgcgtacgcgcgcaacttcatcagcatttttcaccgcacgggtatacgtctgcgttagagtaaaacctgcggtagccagctcttttaaacgatcagacattaactgcggtccatccggccatgcccagacaaaaacgcccagagaattcagcgtgtcgctatcgtcctggcgcatcatcaagccagcaacttttgcgcgggcatttattccccccatttgttgttggatatgcccctcgcgctggagaaatatttccccctgaagcgtactgttggctaaaggcccgctaacggtttgcggcacagcggaaattaagctaactttctgcgtccagtcctcgcctttcaggccattaccgcgactgattgctttgttcagtttcccgtcccgataaaccagggttaccgcaacgccatcaacttttggctgcacccaaagatcgctacgttctcgcatccacagacttaatgcgtttttatccaccattttgcgtacacccgtatgggcaaccggatgcataaccgcaccatttaaaggcggcatcatcacgtcgcggggctcgctcccaaagcagcgttgccactgcgtaagacgggcgcttaactgatcgtaaacaccgtcttccacctcactttttccttccttccagtagtcatcgtcccactgttttatttgctgttgcaggcgggaaatttcttcctgtgctctggctgggctccaggccggacagaccgcccacacagaactttgccagcacaagatacctattaatatcgccatccatactttcatcatcacctccgctgtagatagtcaggcagatatacaacgtgatgaaagcaaagccgagtggcaaaaacggagtctgcgaggacgcttcctgaaaatcgtctttattgcagtgaatgacaggcaaatgcggaagcagctacgcaaaacgcaacaactttgcgcaaaaagtgtgagcaagggctacgtcacatggccgcgccgtgtataataagctcgtatgtaggctttatttcgctaatcacatacgaaagatactcatggctcaaggcacgctttatattgtttccgcccccagtggcgcgggtaaatccagcctgattcaggctttattaaaaacccaaccgttgtgtgacacccaggtttctgttagtcacaccacacgccaaccgcgtcctggtgaagtccacggtgaacattatttctttgttaatcatgatgaatttaaagaaatgattagcagagatgcgttcctcgaacacgcagaagtttttggtaattactatggcactagccgtgaggccattgagcaagtactggcgaccggtgtcgatgtttttctcgatatcgactggcagggcgcgcagcaaattcgccagaagatgccgcacgcgcggagtatctttattttaccgccgtccaaaattgaactggaccgccgtctacgcggtcgcggtcaggacagcgaagaggtcattgcaaagcgtatggcgcaagctgttgcagaaatgagccattacgccgaatatgattatctgattgtgaatgatgacttcgataccgcgttgaccgatttgaagaccattattcgcgccgaacgtctgcgcatgagccgccaaaagcagcgtcatgacgctttaatcagcaaattgttggcagactgaacctgatttcagtatcatgcccagtcatttcttcacctgtggagctttttaagtatggcacgcgtaactgttcaggacgctgtagagaaaattggtaaccgttttgacctggtactggtcgccgcgcgtcgcgctcgtcagatgcaggtaggcggaaaggatccgctggtaccggaagaaaacgataaaaccactgtaatcgcgctgcgcgaaatcgaagaaggtctgatcaacaaccagatcctcgacgttcgcgaacgccaggaacagcaagagcaggaagccgctgaattacaagccgttaccgctattgctgaaggtcgtcgttaatcacaaagcgggtcgcccttgtatctgtttgaaagcctgaatcaactgattcaaacctacctgccggaagaccaaatcaagcgtctgcggcaggcgtatctcgttgcacgtgatgctcacgaggggcaaacacgtagtagcggtgaaccctatatcacgcacccggtagcggttgcctgcattctggccgagatgaaactcgactatgaaacgctgatggcggcgctgctgcatgacgtgattgaagatactcccgccacctaccaggatatggaacagctttttggtaaaagcgtcgccgagctggtagagggggtgagcaaacttgataaactcaagttccgcgataagaaagaggcgcaggccgaaaactttcgcaagatgattatggcgatggtgcaggatatccgcgtcatcctcatcaaacttgccgaccgtacccacaacatgcgcacgctgggcagtcttcgcccggacaaacgtcgccgcatcgcccgtgaaactctcgaaatttatagcccgctggcgcaccgtttaggtatccaccacattaaaaccgaactcgaagagctgggttttgaggcgctgtatcccaaccgttatcgcgtaatcaaagaagtggtgaaagccgcgcgcggcaaccgtaaagagatgatccagaagattctttctgaaatcgaagggcgtttgcaggaagcgggaataccgtgccgcgtcagtggtcgcgagaagcatctttatagcatttactgcaaaatggtgctcaaagagcagcgttttcacagcatcatggacatctacgctttccgcgtgatcgtcaatgattctgacacctgttatcgcgtgctgggccagatgcacagcctgtacaagccgcgtccgggccgcgtgaaagactatatcgccattccaaaagcgaacggctatcagtctttgcacaccagcatgatcggcccgcacggtgtgccggttgaggtccagatccgtaccgaagatatggaccagatggcggagatgggtgttgccgcgcactgggcttataaagagcacggcgaaaccagtactaccgcacaaatccgcgcccagcgctggatgcaaagcctgctggagctgcaacagagcgccggtagtagctttgaatttatcgagagcgttaaatccgatctcttcccggatgagatttacgttttcacaccggaagggcgcattgtcgagctgcctgccggtgcaacgcccgtcgacttcgcttatgcagtgcataccgatatcggtcatgcctgcgtgggcgcacgcgttgaccgccagccttacccgctgagccagccgcttaccagcggtcaaaccgttgaaatcattaccgctccgggcgctcgcccgaatgccgcttggctgaactttgtcgttagcagcaaagcgcgcgccaaaattcgtcagttgctgaaaaacctcaagcgtgatgattctgtaagcctgggccgtcgtctgctcaaccatgctttgggtggtagccgtaagctgaatgaaatcccgcaggaaaatattcagcgcgagctggatcgcatgaagctggcaacgcttgacgatctgctggcagaaatcggacttggtaacgcaatgagcgtggtggtcgcgaaaaatctgcaacatggggacgcctccattccaccggcaacccaaagccacggacatctgcccattaaaggtgccgatggcgtgctgatcacctttgcgaaatgctgccgccctattcctggcgacccgattatcgcccacgtcagccccggtaaaggtctggtgatccaccatgaatcctgccgtaatatccgtggctaccagaaagagccagagaagtttatggctgtggaatgggataaagagacggcgcaggagttcatcaccgaaatcaaggtggagatgttcaatcatcagggtgcgctggcaaacctgacggcggcaattaacaccacgactagcaatattcaaagtttgaatacggaagagaaagatggtcgcgtctacagcgcctttattcgtctgaccgctcgtgaccgtgtgcatctggcgaatatcatgcgcaaaatccgcgtgatgccagacgtgattaaagtcacccgaaaccgaaattaatgttttatgaacccaacacgttatgcacgcatctgcgaaatgctcgccaggcggcagcctgatctgaccgtctgcatggagcaggtccacaaacctcataacgtttctgcgattattcgtaccgcagatgccgttggcgtacatgaagttcacgccgtctggcctggtagccgcatgcgcaccatggctagcgcagcggcgggtagtaacagctgggtacaggtgaaaacacaccgcaccattggcgatgccgtcgctcatctcaaaggccagggcatgcagattctggcaacccatctttctgataacgctgtcgatttccgcgaaattgattacactcgcccgacctgcattttgatgggacaggagaaaacgggcatcacgcaggaagcattggccctggcggatcaggacatcatcattccgatgatcggcatggtgcagagcctgaatgtttccgttgccagtgccctcattctttacgaagcccagcgtcagcggcaaaatgcaggcatgtacctgcgtgaaaacagcatgttgccggaagcagagcaacaacgcctgttgtttgaaggcggctatccggtgctggcgaaagtcgcaaaacgcaaaggcctgccttatccccacgtcaatcagcaaggcgagatcgaagctgatgccgactggtgggctactatgcaggctgcagggtaagtgccatgaaaggtcgcctgttagatgctgtcccactcagttccctaacgggcgttggcgcagcacttagtaacaaactggcgaaaatcaacctgcataccgtgcaggatctactcttacaccttcccctgcgctacgaagatcgcacccatctctaccccatcggagaactactgccgggcgtttatgccacggtggaaggcgaagtgctgaactgcaatatctccttcggcggtcggcggatgatgacctgccagatcagcgacggttccggcatcctcaccatgcgctttttcaatttcagcgcggcaatgaaaaatagcctggcggcgggccgccgtgtactggcttatggcgaagcaaagcgcggtaaatatggtgcggagatgatccacccggaataccgcgtgcagggcgatctcagcacgccagaattacaggaaacgctcacgccggtttatccaacaacggaaggcgtaaagcaggccacgctgcgtaaattaaccgaccaggcgctggatctgctcgacacctgcgccattgaagaactcctgccgccggaactgagtcaaggaatgatgacgctaccggaagcgttgcgcactttgcaccgcccgccaccgacgctacagcttagcgatctggaaaccgggcagcatccggcgcaacgtcgtctgattctggaagaactgctggcgcacaacctcagcatgttagccttacgtgccggagcacagcgttttcatgcccagccgctgagcgccaatgacacgctgaaaaataaactcctcgccgccttaccgttcaagccaacgggcgcacaggcacgcgtagtggcggagatcgagcgcgatatggcgctggatgtgccgatgatgcgtctggtgcagggcgatgtaggttccggtaaaacgctggtcgccgccctcgccgcgttgcgtgcgattgcccacggcaaacaggtagcattgatggcaccaaccgaattactcgccgagcagcacgccaataacttccgcaactggtttgcaccgctcggtatcgaagtgggctggctcgccggtaagcagaaaggtaaagcacggctggcacagcaggaagccatcgccagcggtcaggtgcagatgattgtcggtacacacgccatcttccaggaacaggtgcagtttaacggcctggcgctggtgattatcgacgaacagcatcgttttggcgtgcatcagcgtctggcattgtgggagaaaggccagcagcagggcttccatccgcatcagttgatcatgaccgccacgccgatcccccgcacgctggcaatgactgcgtatgccgatctcgataccagcgtgatagatgagctgccgccaggccgcacgccagtgactacggtcgctattcctgatacccgccgtaccgacatcattgaccgcgtgcaccacgcctgcataactgaaggtcgtcaggcatactgggtttgtacgttgattgaagagagcgaattgctggaagcgcaggcggcggaagctacctgggaagagttgaaactggcgctaccagagttgaacgttggcctggtacacgggcggatgaaacctgccgagaaacaggcggtgatggcgagctttaaacaaggtgagctacacctgctggttgccacaaccgttattgaagtcggcgttgatgtgcctaacgccagtctgatgattatcgaaaacccggagcgtctgggtctggcgcagttacaccagctgcgcgggcgcgtaggtcgtggcgcggtggcttctcactgcgtgctgctctacaaaacgccgctttctaaaacggcgcaaattcgcctgcaagtgctgcgcgacagtaacgacggttttgtgattgcgcaaaaagatctggagattcgcggccctggcgaattgttaggcacgcgtcagacgggtaatgctgaatttaaagtggcggatttactgcgcgatcaggcgatgatcccggaagttcagcgcctggcacgccatattcacgaacgttacccacaacaggcaaaagccctgatagaacgctggatgccggagacggaacgttacagcaatgcgtaaaaggcggcagtgagaagaccgccatttcaggttaccctaccttcctgccggatgcgattcatcaccctacaaattcaataaattatgaatcaatacgcaggcttgataagcgaagcgtatcaggcatttgtctttgttgcggcggcacttctaccgccgcttcatcggttaaccggcaaaaatcggcaacatcaaatacaacttaattaccagcgcattgacgatatcgataaagaacgcaccgaccatcggcaccaccaaaaacgccatgtggcccgggccaaagcgttcagtgatcgcctgcatgttggcgattgccgttggcgttgcaccgaggccaaaaccacagtgacccgcagccagcactgccgcatcgtagtttttgcccatcatgcgccaggtaacgaagatggcatacaacgccatgaagatggtctgtaccaccagaatcgccagcatcggcagcgccaggctagccagctcccacagtttcagccccatcaacgccatcgccaggaacaagctcaagcttacgttacccagcacggataccgcacgctcaaagacgcggtaaaagcccattatactcagaccgttgctcagaatcacgccaacaaacagtacacagacgaaggtcggcagttcaaaagcagtgccagccaaaagttgcgcaacaattttccccaccgtcaggcagatagcaatcagcgcgatagtttcaatcagcaccaagctggtgatcatgcgtcccacatccggcttttcaaacgccgtcgggacttcctggtcatccggaataccgttcggcgtggtggagtgtttcaccagatagcgcgccaccggaccgccaatcaagccgcccagcaccagaccgaacgttgcacaggccatcgccacttccgtcgcattggtgaagccataacgttcaatgaacaatttactccacgcagcgcccgtaccgtgaccgccggaaagagtaatagaaccggccaacagccccatcagcggatcaagccctaacaagctagccataccaatgccaatggcattttgcatcaccaacagaccaacaaccacaatcaagaagatgccaaccacacgcccaccggcacgcaaactggcaatgttggcgttcaggccaatggtggcgaagaaagccagcattaacggatcgcgcagggacatatcaaagttgacttcccagcccatgctttttttcagtactagtagcgccagcgccaccaacaaaccacccgcaacaggttccggtatggtgtatttcttcaaaaaggagacggaatggaccaacttacgcccgagcagcaacgtcagcgttgcggcaacaagcgttgctaaagtatcgagatgaaacatagttactcctttgtatccgcatcactctttcatactcgtcatacttcatcgcgcagtggcaacttcatgaactatgacgggtatcgagttatgctttcctgggtcaaattctcagctgttaatgaacaaatggcatggattttaagcagaaaaataccaaaagttatataaaaaagtgcatttatctcatttaaatatttagatgaggatgtggcaaacgtttgcttttctctttcggtcagctaaaatgcccgctttgctaccacgggattgttttcgatgtctgtttccaccctcgagagtgaaaatgcgcaaccggttgcgcagactcaaaacagcgaactgatttaccgtcttgaagatcgtccgccgcttcctcaaaccctgtttgccgcctgtcagcatctgctggcgatgttcgttgcggtgatcacgccagcgctattaatctgccaggcgctgggtttaccggcacaagacacgcaacacattattagtatgagcctgtttgcctccggtgtggcaagcattattcaaattaaggcctggggtccggttggctccgggctgttgtctattcagggcaccagcttcaactttgttgccccgctgattatgggcggtaccgcgctgaaaaccggtggtgctgatgttcctaccatgatggcggctttgttcggcacgttgatgctggcaagttgcaccgagatggtgatctcccgcgttctgcatctggcgcgccgcattattacgccgctggtttctggcgttgtggtgatgattatcggcctgagcctaattcaggttgggttaacgtccattggcggcggttacgcagccatgagcgataacaccttcggcgcaccgaaaaatctgctgctggcaggcgtggtcttagccttaattatcctgcttaaccgtcaacgtaacccttacttacgcgtggccagtctggtaattgcgatggcggccggatatgcgctggcgtggtttatgggcatgttgccagaaagcaacgaacctatgacgcaagaactgattatggtgccaacgccgctctattacggtcttggcattgaatggagtctgctgctgccgctgatgctggtctttatgatcactagcctggaaaccattggcgatatcacggcgacctctgacgtttccgaacagccagtgtccggtccgctgtacatgaaacgcctgaaaggcggcgtgctggcaaacggcctgaacagctttgttagcgcggtgtttaacaccttcccgaactcctgcttcgggcaaaacaacggagtgatccagttgactggtgttgccagccgctatgtcggttttgtcgtcgcgctgatgttgatcgtgctgggtctgttcccggcagtgagcggttttgtacaacacattccagaaccggttctgggcggcgcaacgcttgtaatgtttggcaccatcgccgcctccggtgtgcgtatcgtttctcgtgagccgctgaaccgtcgggcgattctgattatcgcgctgagcctggcggttggtctgggcgtgtctcagcagccgctgattttgcagtttgcccctgaatggctgaaaaacctgctctcctccgggatcgccgcgggcggtattactgccatcgtgctgaatctgattttcccaccagaaaaacagtaattcactggcggcggtaagataattaccgccgcagtctcacctctttaaccattcccgccttgaggattgcgcgtaaatcgtgcataactcccttatgtgcatttcacgggatggaagaccatgaaatttattgggaagctgcttctctacattctcatcgctctgttagtggcgatcgctggcctctattttcttctgcaaacccgctggggagcagaacatatcagcgcatgggtttccgagaatagcgactatcatctggccttcggggcgatggatcaccgtttttccgcgccatctcatatcgtgctggagaacgtcacgtttggtcgtgatggccagcccgcgaccctggtggccaaaagtgtcgacattgcgctaagcagtcggcaactgaccgaaccacgccatgtcgataccatcctgctggaaaacgggacgctgaatctcaccgaccagaccgcgccgctaccgttcaaagccgatcgtctgcaactgcgtgatatggcgtttaatagcccgaatagcgaatggaaactgagcgcgcagcgggtaaatggcggcgtagttccgtggagtccaaaagccggtaaagtgctgggtacgaaggcgcagattcagtttagtgccggaagccttagcctcaatgatgttcctgccaccaatgtactgattgaaggcagtattgataacgatcgcgttacgctgactaacctgggtgccgacatcgcccgcgggacattaaccggaaacgcgcagcgtaacgccgacggcagctggcaagtggaaaacctgcgcatggcggatatacgtctacaaagcgaaaaaagcctaaccgacttctttgcgccattacgctctgtcccgagcttgcagattggtcgcctggaagtgatcgatgctcgtttgcaaggtccggactgggcggtgaccgacctcgatctcagcttgcgcaacatgaccttcagtaaagatgactggcagacacaggaaggcaaactgagcatgaacgctagcgagttcatttatggtagcctgcatttatttgacccgattataaacacggaattttccccgcagggcgtagcgctgcgccagttcaccagccgctgggaagggggtatggtcagaacgagtgggaactggctgcgtgacgggaaaacgttgatccttgatgatgcggcaattgccgggctggaatataccttgccgaaaaactggcaacagttgtggatggaaacgacacccggttggttaaacagcctgcaactgaagagatttagcgccagccgcaatctgatcattgatatcgaccctgacttcccgtggcagctcaccgcgctcgatggttacggtgccaacctgacgctggttaccgatcataaatggggcgtctggagtggcagcgcgaatctgaatgccgccgccgcgacattcaatcgtgttgatgttcgtcgcccgagcctggcgctgaccgccaacagcagcacggtgaatatcagcgaactgagtgcatttactgaaaaaggcattctggaagccaccgccagtgttagtcaaacgccacaacgtcagacacatatcagcctgaatggacgcggtgtgccggtgaatattttgcaacagtggggatggcctgaattaccgttgactggcgacggcaatattcagcttaccgccagtggcgatattcaggccaatgtcccgttgaaacctacggttagcgggcaattgcatgccgtgaacgccgcaaagcagcaagtgactcaaaccatgaatgctggcatcgtttccagcggtgaagttacaagcacggagccggtgcggtaaacatcaatctcgccgggtacgactcagacgtacccggcattccatcaatagattacaacgtaattgtcagcgcattcccttgaggcttcaccaccagcccctgctcactttcagcctggctaccgtcttgcagaccatttactttcacaacattgcgcaggcacagtgtccagttcttcgcctcgcccgcaccagtcacagtaatcgtgttgccagtacgtgctgcttttaaagtaaagatcacgcttccgtcagcagcgggcacttcacagacggcttcatgcccgtcttgcagattgaagaggtggaatgccgtgccttcgtgccacacgtaatcgggacgttgatcgttgttgcccagcgccagtagagtgttatcacgcacataaacgggcagactcaggaagccgtgctgctgtttatgccagcgactaccgtcgagttcatcgttgtgccacaggtgtgtccagcgaccttccggcaggtagaactgcacatcgcccgcttcagtgaacaccggcgcaaccatcacgttgtcgcctaacatgtattgacggtcaaggtaatcacaagccggatcgtccgggaactccatcatcatggcccgcatcatcggcgtaccccgcgcgttcgcacgcgcagcttcacgatacagatacggcatcatgcggcatttcagttgcgtgaagaagcgcaccacatcacaggactcatcatcgtaggcccacggcacacgataagatttgctaccgtgtaaacggctatggctggagagcaaaccaaacgcgcaccagcgtttgtaaacgtgcgccggagcggtattttcaaagccgccgatatcgtggctccagaagccaaaaccactaaggccaatagacaaaccaccgcgcaggctttccgccatactttcgtagttagcgtaacaatcgccaccccagtgtaccgggaatttctgcgcaccgacggaggcgctgcgggcaaacaagacagcttcttcctcaccaacggtgtccttgagcacgttccacaccagttcgttgtagatgtacgcataatggttatgcattttctgcggatcggaaccgtcaaaccactgaacatcagttgggatacgttcgccaaagtcggtcttaaagcaatcaacgcccatcgcgaccagacctttcagtttgtcggcgtaccatttgcaggcatccggattggtaaagtcataaatcgccagacctggctgccatttatcccactgccataggctaccgtccgggcgtttgagtaaatagcctttctcttgtaactctttaaagacgggggatttttgaccgatataggggttaatccagacgcagattttcagtcctttcgctttcaggcggcggatcatcccttccgggtcagggaaagtcagcgggtcccactcaaaatcgcaccactggaaggctttcatccagaaacagtcaaagtggaaaacatgcagcggcagattgcgttccgccataccatcgataaagctgtttaccgtcgcttcgtcgtagttggtggtaaaactagtggttagccacaggccgaaggaccacgcgggcggcagcgccggacgaccagtaaagcgggtataacgatcaagtaccgctttcggcgtcgggccgtcgataacaaagtattcgagatattcactctcaacgctgaactgcactttggagactttctcgcttcccacttcaaaagagacacactggggatgattgaccagtaccccataaccacggttagtcatgtagaacgggatatttttatacgcctgttcagtacttgtgccgccgtcccggttccaggtctctaccgtctggccattgcgcaccagggcagtaaagcgctctcccagaccgtaaactgtttcgccaacgccaagatcaagccgctcaaacatataattgcgttgattattcgtgtcctgcacgtagccattatttttcacctgactaccggtaatacgttcgccgttgcgcagaaaatccagactccagaactcacctttgctgacacgcgcgcttaagttgccacttttaaactcagcataacgttctgtgttttcgattgtgaccttcacgtcctgcaaaatattgagcggataatgaggaccgttattcagcgccccctgaaaatgctcaatccgcacaccgacaataccttcctgtggggagaaaaagcgcaacgtaaataaaggcgtatcaagctgccaggtacgttcacgcacatcacggggggcagcatagaccaccatttcattatcctgctgttcaacctcgaacacctgaagcgggtgaatcaaattgaggccaggttgaatcaaccagtttccatcgctaattttcattgccgttccttagttctgcacttcttgagaggtgaattgttgctggcaacggcgtttaccctgagccagctgttccataacggttttcagattgtgcgtcgtgagactgtagtagcgtttagcgataatcgcgctcagcaaataacagatcgccggaacaatcgtgaatagcgcaataatgatgctaatcgtggcgctgttctgcgctttttctgccgcatcatatccgccataagccagcatccagccgataagagcgccgccgaaggccaaccccagtttgagcacaaacagcgtgccagcaaaactgatcccggtcaggcgtttaccattgcaccactcgccgtagtcgacggtatcggacatcattacccactggataggtgtcaccagttgatgcaacacaccaatcacgaagatgaagacaaacatagtgatgctggcctgcatgggaacaaagaacatcgcgaggctaatcactgccagcagggcgttcgtccaccagaagatagtgactttacatttccagtcggtcagaggttttgccagtgcggaaccaatcaggttacccacgcaataagtggtgagaaaagcgacaaacacttccggcgtgcccaaaatccatgtgacgtaatacatcatcgccccaccgcgtacgcacaccgccaggatattgaaaatggttagtaaaccgacaatccgccactggtcgttttgccagatatcacgtaaatcttcccgcatagacgttgttgtaggtggtgcttcaacgcgttctttagtggtgaagaaacaaaatgccagcatcatgaatgccaccacggaaaggaccgcgataccgccctggaaaccgagtggtttattatcaccgccaattaaattaaccagtggcatcatcagaacagtagaaagcatgcctcccgcggtcgccagcacaaaacgccaggattgcaggctgatacgctgagtcgggtcattggtgattacaccacccaatgcgcagtaagggatattgacgacggtataaagtaaggtaagtagggtgtaagtaattgctgcatagatcattttgccgttcatactgagatctggcgtgctataggccagtacacagacgatcccgaatggcagtgcgccaaacagtacccacggacgaaatttaccccagcgagagcgcgttcgatcggccaacaaccccatgcaaggatcggaaatcgcatccagtgcacgagcgaccaaaaacatggttccgacaaaaccggcaggaatgccaaaaatatcggtataaaagaacatcatatataacattacgttatcgaaaataatgtggctggcggcgtctcccatgccataaccaattttctctttaacggacaacacttcactcttcatctgcttttccttgatgctataggggtgctgagaccgataacgcattttgtaaaccatccctgtgagagcgaatattccgatatctggttattaatttatgattcttgttttatgtgatcgtggtagcgttaattccgctcatatatcattgtaaaatatgggttttatatgaactataatgctttcgtgataatacgctgcgtgtattaggcggaaaaaactgatctgggggatgtagaaactcaaggaagtagctataatgcgccccgcctccatgtagcaatcgaggcgcggaagatcgtcgtctccggtgaggcggctggacttcaaatccagttggggccgccagcggtcccgggcaggttcgactcctgtgatcttccgccaaaatgcctctcctgacgttctccaaccccttgtaatactgtcaatccagatattttctactgctcaatattcaatcggcttcaggaatacctggtctaaggttttgtgatggacgatgagcggctgaagaatccgcctgtcggttcttctgtcctcgaacgcatccgcgatattcacgccagtatgcgccgtgtttatttgcaggtgatttgcccccctgctgactctcagccaactgtatcgccattaaggtgaagatgttgttttactcgccccagaacacccttttttatacgactattctatttctttaaccgctggcgaaaaaaactgactataaacttcaccaataatcagactgccatcaagattaatttgttcatttaatatatcaaatcaacttgttttatttttactatcaaaaatagctcattgccttactataattaatatataaattcggtaattaattcttaacatgcttttactaataatctcaattgctggccctataatattgcgctagcattgctttctggttgtatcagcgatactcaaaaattcttaatacaatactcattcgactggtacttatttgtaactcagttatattttttcgcccggtgattcagaagaatgcaaaaaacggctaccactccaagtaaaatacttgatctcactgccgcggcatttttacttgtcgcctttctgacgggtattgcgggcgctcttcagactcctaccctaagtatattcctcgcagatgaactgaaagcccgtcctataatggtaggttttttcttcaccggtagcgctattatgggaattctggtcagtcaatttctggcaaggcactccgataaacaaggcgaccgtaaattactgattctgctatgttgcttatttggagtgctggcctgcacgctttttgcgtggaatcgcaactacttcattctcctcagtacgggcgtacttctgagtagttttgcttccaccgcaaacccgcaaatgttcgccctcgcccgtgaacacgccgacagaacaggccgtgagacggtcatgttcagtacatttttacgtgctcagatcagccttgcctgggttatcgggccaccgctcgcttatgaactggcaatgggatttagttttaaagtgatgtatctcaccgctgccatcgcatttgttgtttgcggactgatagtctggttgtttttgccaagtatacaaagaaatattcctgtcgttacccaacccgtagaaattttaccctccacccacaggaagcgggatacgcggctactttttgtggtctgtagtatgatgtgggcggcgaataatctctacatgataaatatgccgctatttattattgatgaactgcatctaaccgataaactgactggagaaatgattggtatcgctgccggtctggaaattccgatgatgttaatcgcaggctattacatgaaacgtattggcaagcgactattaatgctcattgctatcgtgagtggaatgtgtttttacgccagcgtactcatggcgacgactccggcggttgagctggaattgcaaattcttaatgccatcttccttggtattctctgtggtatcggcatgctttattttcaggacttgatgcctgaaaaaataggctctgcgacaacgttatatgcaaatactagtcgcgtcggctggattatcgccggctctgttgacggaattatggttgaaatctggagctaccatgcgttgttctggctggcgatagggatgttgggtattgcgatgatttgcctgctgtttattaaagatatttaactcaccagtctgggctaagaaaaatcggcgtggcgcaaacagagccatcctcgccatttttgctatcatgcctgcatacataaacgacaaaacagtatgcagagggaaaaatgggttccaccagaaaggggatgctgaacgttctgattgccgccgtgttgtggggaagtagtggggtctgcgcgcaatacatcatggagcaaagccagatgagcagccagtttttgactatgacgcgtttgatattcgccggtttgattctactgacgctgagttttgttcatggcgataaaatcttttctattattaacaatcataaagatgccattagcctgctgattttttccgtggttggcgcgctaactgtacagctcacttttttgctaaccatcgaaaaaagcaacgcagccacggcaacggtgctgcaattcctcagtccgacgattatcgtcgcctggttcagtctggtgcgtaaaagccgcccgggcattctggttttctgcgctattttgacaagcctggtcgggacttttttattggtgacacacggtaatccgacgagtttaagcatctctcctgccgcgttgttctggggcattgccagcgcatttgctgctgcattctataccacctatcccagtacgctaattgcccgctatggcacgttaccagtcgtcggctggagtatgctgattggcggtctgattctgttgcctttttatgccagacaaggaacaaactttgtcgttaacggcagtttgattctggcgtttttttatttggtggtcattggtacgtccctgacatttagtctgtacctgaaaggagcacaattaattggcggtccaaaagccagcattttgagctgtgcagaaccattaagtagcgcgctactctctttgctgttgctggggatcacgttcacattaccggactggctgggaacgctgctgattctgagtagcgtgattttgattagtatggattcccgtcgccgcgccagaaaaataaatcgtccggcgcggcataagtgagaattaccagccaggcaccgcgccaccgttaaaaatggtttctgccgctttagcgacttcgggactttgataagattgcagaaattccttcacgttttctgcattcttattatcttcccgtgccaccaaaatattcacatacgggctattcttatcttcaataaatacgctgtcgtgcaccggagaaagcccggtctgctgaatgtaagtggtgctgataatcgctacatcaactttgggatcatccagtacgcgcgggagctgcgccccctcgagttccataatctgcaaatgacgaggattatcggttatatccagcgcggtaggtaataacccttttccctctttcagagtaattagcttctctttttgcaacagtaaaagtgcgcgaccaaggttggtcgggtcgttggggatcgccactgtcgcgccttcttttatttgcgccacggttttgatttttttggaataacccgccatagggaagacaaacgtatttcccaccgctaccagtttataaccatgcgcctgattatcttgttcaagaaagggtcgatgctggaagacattcgcatcaagttcgccatgatttgtcgcatcgttcggtagcaagctaccgctaaatcctaccagttcaacatcgaggccatatttctcttttgccacctttttagcgacttccgcgacatcttgttctgcgccatttataacgccaactttaatgtgttttgcatcgctgctactctggtcgcaacctgccagcagaattccggccagcaataatgcggcccctgtccgtagatgatgtgttgtcagtttcatttttttatccttttattaatgattacctgactatagcggtaaggtcgctgcggtttaaaaaacgaaacgctatcgataagaataaaaaggaataaaagtggaatataaagtctggcacttcttactgaccacgcaagcgcgtttcgtacagcatgatgagagcgatgaaagcaaactacacttatgcttcattcgatacacatttgtaaaaggttgaatccatgaaaccaacgacactactgcttattttcacttttttcgctatgccaggcatcgtatacgccgagagcccttttagcagtctgcagtccgcaaaagagaaaaccacggtattacaagatttacgtaaaatttgcacgccacaggcgagtttaagtgatgaagcgtgggaaaagttaatgttgagtgatgaaaacaataaacaacatatacgcgaggccatcgtggcgatggaacgtaataatcagagcaattattgggaagcgttgggtaaggtagaatgcccggatatgtaagaacagcaacaactactgaccaacgcttctttacctgatatcaggatttcttcattttcacctttgcagtaaccaacaatgcagtcagcaacatcaatgtgccggacaacatcaacgggctagtcagaccaatattatccagcgcataaccgccgattgccgcgccacaggtattagcaagctgaataaccgccacctgaatagacccggctttttctgcctgatcggccaggctgcgggtgatccacgtactccagccgacgggaaccaatgcaaaagttagcccccagataatcgccacgccggtagcaacgattttatcgcttccccacaacgtcagtaccaacgcactcacagccagtattaacggcgcgcctgctaaggccagttttacgctacgtttaagaatgaagctgctaaggctcgtaccaataaagctggcgataccaaaactcaacagcaccagcgttaagccatccacgccgaatcccgccaggttcatatacaccgggcgaatatacgtgaagaaagcaaactgcccggcgaaagacatgaagatggcgatcatccctgccatcacacccggacgttgtaataagcggaaagtattttgtttctgatggctgggttcgcctggcagactaggcaaacttttgataatccagaaaatacacagcacgcccatcaccgccgccgcattaaagacattgcgccaaccgataagctcgcctaaaaaactgcccaacggcgcggcaatcaccagcgcaatagaaaccgcgccgaagatcacgctcagcgccttcggcaccgtacgcggcggcaccagacgcatggtcaggctcgcgctcatcgcccagaacccgcccagcgccagccccagacaggcacgaccgattaaaagcaaactgaaactgttagcaaaggaaaccagcaagcaggagagcgtcagcaaaacggcaaacaaaataacaacgtagcggcggtcagtagcctgaattgtctgggtaataaacaaactggcaaacattgccacaaaggcggtcacggtcacgctttgcccggcaaccccttcgctaatgcctaaatcctgggccattggcgtcaacaaactgacgggcaaaaactcaacgataatcagacaggcgacacaaaacgccacgctgaaaacggcactccagttcggtcgggtgatggcatccgcgccgcggttttcggcaataaattcactcatggtgttacccgtggcatgtttcaggggaaaagcgctccactttaacatactaatgtgactcgcatttaacgtttttgcaacttttacggtgttgctactgctggagttaagatcgaaacggaacagggcaaagattaccggatgcggcgtgaacgtcttatccacccgacaggtcaggcgcggtctgtaggctgataagacgaaacggtttcaatgcaaccagtgaacgccctcggcaggctgaaagaacgcgttatagcgcatctgaaaagcattaatatcctgcatttcaggttcggtttcgcgcagaaaacctagcgccagcctgacctgagcgtcggtaatcggcgcggcgaggcgagctttttgtaaaatccgatgccattgcagcaggttctgttcgctaccatcgacaatgacaatttgccagatgagcaacacctgcgcggcgttttgcaggtggctctcatccggacgatgcaaataacgtaaaaattcgtcaccagcactctttcccatttgatcgaccatgctctccacgggtacgacatcgatgttcagccgatcgctgagacggcgaatcgcttttctggccccggatgtcagcacccgaaaaccaaccacaaacactaccgccagcgtggcgagcattatccagatcatgagttctcctgcgtaatcagaactcatgatatctggaaaccctcgccagttattaatccaccagaataatcttcagtgcaaacagagctgcgaccaccaccacacacaggttcagatcgcgccagcgcccggtgcatactttcatgatgcagtagctcataaagccgagtgcaatcccttcggtgatgctgaaagtaaagggcatcatcaccgtggtaataaacgcaggcacgctttcggtaaaatcatcccagttaacgcgcgccaggctgctagtcatcagcacgccaacaaagattaacgctccggcggttgcgtaaggaggaactatcgccaccagcggactgaagaacataaccaacaggaacataacgccaaccacaaccgcagtcagccccgtgcggccaccgactgccacaccagaagtactttcaatataggcagtaacagagctggtgccgataaacgcacccgccacgctactgacgctatcaacatacagcgccttattcatattggggaatttaccgttaccatctattaagcccgctttatcagttacaccaattaatgttccactactatcaaataggttgatcagcataaaggagaaaatgataccggcgagttcaagtgttaacgcgccgctcaaatctacttcaccaatgacgccgctaatatcaggcggaatggaatagacgccgctaaaatgaacatcaccgaaaaataatccacagcaagacgtcaccacaatagaaaccagcaccgcggcatgaaaatgacgactactcaacacggttataataaaaaaccctaaaatacctaacaacacgccgtgagaacttaaatcgccaatcatcaccagcgtgtctttattggcgacaataacgccagtattttttaatcccattaaggcgataaataatccaattccgctggtgataccaatacgtaaacttaagggaatgttggagatcatccagtaccggatacgaaacagcgtgagcaaaaatagtccaactgcgccccagaatattgcgcccatcccggtctgccaggagatgcccatcgcccccacgaccacgaaggcaaagaaggcgttcagccccattgccggagccagcgccacgggtaagttagcaaatatccccatcgcaatactgccgataccggcaatcaaacaggtggtaacaaacaccactttcgggtccatttgtgccgcgccgaggatttgcgggttcacaaaaacgatgtacaccatggttaaaaaagtggtcatccccgcaatcaattctgtgcggacggtggtcccatgctgaggtagtttaaataatcggctaagcgtcccactttcattactcacgtaatcggtattgtcattattcatttttttgtccattggaggagatttaatcccttgcttttgtaaaacaaatgacaacaacggttcagtgataattatcacatttcaattgcacattaatggatattctttaataatctcgcgacgtttctttatgataaataataatcaaattgataaaatcaaaatgagaaaaatatgaataattctattaaccataaatttcatcacattagccgggctgaataccaggaattgttagccgtttcccgtggcgacgctgttgccgattatattattgataatgtctctattctcgacctgatcaatggcggagaaatttccggcccaattgtgattaaaggacgttacattgccggtgttggcgcagaatacactgatgctccggctttgcagcggattgatgctcgcggcgcaacggcggtgccagggtttattgatgctcacctgcatattgaatccagcatgatgacgccggtcacttttgaaaccgctaccctgccgcgcggcctgacgaccgttatttgcgaccctcatgaaatcgtcaacgtgatgggcgaagccggattcgcctggtttgcccgctgtgccgaacaggcaaggcaaaaccagtacttacaggtcagctcttgcgtacccgccctggaaggctgcgatgttaacggtgccagttttacccttgaacagatgctcgcctggcgggaccatccgcaggttaccggccttgcagaaatgatggactaccctggcgtaattagcgggcagaatgcgctgctcgataaactggatgcatttcgccacctgacgctggacggtcactgcccgggtttgggtggtaaagaacttaacgcctatattactgcgggtattgaaaactgccacgaaagttatcagctggaagaaggacgccggaaattacaactcggcatgagcttgatgatccgcgaagggtccgctgcccgcaatctcaacgcgctggcaccgttgatcaacgaatttaacagcccgcaatgcatgctctgtaccgatgaccgtaacccgtgggagatcgcccatgaaggacacatcgatgccttaattcgccgcctgatcgaacaacacaatgtgccgctgcatgtggcatatcgcgtcgccagctggagcacggcgcgccactttggtctgaatcacctcggcttactggcacccggcaagcaggccgatatcgtcctgttgagcgatgcgcgtaaggtcacggtgcagcaggtactggtgaaaggcgagccgattgatgcgcaaaccttacaggcggaagagagcgcgagactggcacaatccgctccgccatatggcaacaccattgcccgccagccagtttccgccagcgactttgccctgcaatttacgcccggaaaacgctatcgggtcattgacgtcatccataacgaattgattacgcactcccactccagcgtctacagcgaaaatggttttgatcgcgatgatgtgagctttattgccgtacttgagcgttacgggcaacggctggctccggcttgtggtttgcttggcggctttggactgaatgaaggtgcgctggctgcgacggtcagccatgacagccataatattgtggtgatcggtcgcagtgccgaagagatggcgctggcggtcaatcaggtgattcaggatggcggcgggctgtgcgtggtacgtaacggccaggtacaaagtcatctgccgttacccattgccgggctgatgagcaccgacacggcgcagagcctggcggaacaaattgacgccttgaaagccgccgcccgtgaatgcggtccgttacccgatgagccgtttattcagatggcgtttctttctctgccagtgatccccgcgctaaaactaaccagtcaggggctatttgatggcgagaagtttgccttcactacgctggaagtcacggaataataaaaaaagcccggcgtcatgccgggcaaaagtcaccagttacgtttatgccactgtcaactgctgaatttttttctcgcggcggattttgcgttcttccattaccgccactatcgccatcaggcagatacaaccaatcgcggcgatatccagcgcggcgaaggtgcctgcccagccggtaaggccgaataccggcgtcccatcggcaatcattcccagacctaacttggcaaagctgtcaccaatcaggtaagcaaaggtgcctttaataccatcggcagcgccaatcgcttttttaggtacaaagccaacagcagccacaccaatcaacaattgcgggccaaagaccaggaaacccaacgcaaagagagaagccagatagatatattcgttactggcatgttgatacacaccgagcgtggcgataatcagcgccagcgcgatgcaggccaccaggccacggcgaccgttcgccaggtcagagagccagccccacagcagcgtaccgaccagcgcaccagcttcaaacagcgtaaagccctgaatcgccaccgctttagagagtttcagttcctggaacgcgtatacggtactccactggtcgataccaatacgtaccacatagaggaaaatgttggcgaagcacagcagccagatcactttgtttttcagcacatactcaacaaagatctgccacttggtcatatcggtagattctgtctctttgtcctcttcgctgatctcctcgccgaacagttcttcagctttgccgaggccataagattccggggagtcgctgccgtaacgcaggccgataaaaccgacaatcagcgcgataatgctcgggaagataaacatgccgatgacatggccatcgaacaggtaatttgccccgaacagcgccacacctgctgcgcctgcaccgccaaggttgtgagaaatattccagaaaccgaggaatgtcccgcgtttacgacgcggcgtccatttggtgatggtggagtaactgcagctaccgccggtactctggaaaagccgcttaaggcgtagaaggcaatcatcaggaacaggctaacgctgccgctgcccatactggcactgaagcccagcatacaaatagcagagaggatcagcatgaacggcaggaattgtttggtgtttttgccgtcggcgtagtaggaaaccagcgttttacccacgccataagtgatggagaaacccaggccgatcatccccagctgcgtcatgctcaacccgtaggtgctaatcatatcgttctgcgcgatgttaaagttcttgcgaatcaggtacatcgtcaggtagccgataaagaccaccaggtaggattgcatgaacggtttgaaccacattttgcgccgcacttcgagcggaaggtccagggtcggcttgcgaacctggtttaagaaagccagcatgggttactcctgaaatgaatacctgcgtgaggcatgcattgtaaaaatcagcagcaaatcaggcctgagatagcgtccaggcaaaacctggaaaatttcttagttttgccggatatgaagtgaaaaggtgagatgcatcacgcttcgcgcggtgtctgggcgttcaaaaagggcagtaacagcagtgcggaaatcccggcggcgatagagataaccacaaaaaatccgctccagtgccaggtatcgagtactttcgccagcggccaaccagcaaggctcgcccccagataagcaaacaagccgacaaaccccgtcgccgcccctgccgcctctttgtgggaacactctgccgccgccataccgattaacatctgtgggccaaagacaaaaaaaccaatggtgaagaagcaggttgcctgcatcacgtagctggcaaatggcatcagccacagggagccgacactaagcaaaattccggcggcgaaaatcaaattcatcggccctcggttgccgttaaacaatttgtcgctgccccaaccggctaccagcgcaccgataaatccgcccagttcaaacatcgtcactgccgtattcgccgtgaccagatcgacgcccagtgtctcggacatatacaaattgccccagtcgttgatcgccgcccggaccacatagaccagcacatagcaaaagctaagcagccagatatacggattcagcaacacatatttggtgaggatctctttacgcgtcaaccctgccccttcttgttgttgagcaatttccagcgcgtcgtgtcgccattcaccgaccgccggtaaacctaacgcctgcgggcgatcgcgtagccgccagcagagaaaaatccccacgactatcgccatacaaccagcaatcatcatcccggcacgccagccgtaatgcagcgcagccgctgccatcacaatgggaatgagtgcgccgccgacgttatgcgccgtgttccataatgcccaccaaccgccgcgctcggtacgactataccaggccgttaacagacgcgcacacaccggactaccccagccctggaaaaaggcgttcagcacccagagcacggcaaacgcccataggctcgtgctgaagccaaacagaatgttgataatgcccgtggcgataagccctatccccataaaataacgggcattactgcgatcgctgacaatgccggagacaaacttgctcacgccataggtaatgtaaaacagggtcgctaacaggccgatatcgctacggctgagcacgccgttagcaaggatttctggtacggcggcgttaaaacttttccgcgtgaagtaaaacagcgcgtaacccagccagatggtcagcagaatatgccgacgccagtagcgatagcgggcatcaatttcatatttatcagtcattaatggcgcatcggcaggcgctttcagaaacggcaacatcatcaaaccttagacatagcgttgaggtagagaaacgctgacacgcgtgccgtgcagacaggaaatgtgtaatgtgccacccagcgccgttacgcgctcgcgcattccggtgaggccaaaaccttgttgcccggaacccggcggcaaaccgctgccatcgtcttcaataaccagcatcaaccgttcatcctgctgccagccttgcagggtgaccgcgctggcatcagcatgtttcacaatgttgttcagcccttcctggcagacacgaaacagcgtcacgcgctggttttcgcttaacgcactttcatcgattcgccattcgagatggctgacaataccgcgcccttccagctccatttcccgcatcagactgcggatggcctgctccagggtgagatcatccaactggcgcggacgtaaccgacccaacaaacggcgcaccgcgtcgtaaacgcccaggcttagttgttcgatgagctgcccgctctgcttcacgctggcgttatctgccgccagccgctgaacaatgcccgcctgagtacgaatagcagtgatggtctgaccgatatcatcatgcagctcacgcgccacatcacggcgcacgctctcttcggtttccagcaaccgttcagccagatgctgattgcgcgccagttccttttgcaggctctggttaagttcacgcaaccgctggatgccagcgccaagcaacaaccctgtcagactttgcaccagcaggctgagcaataaatccaccggatgatcgcgccaggtttgactggcgatcagcgcgatggcgttcatcaacgtcgcaatcagcgccccttgccaaccatagtgccaggccagcgcgataatcggcagcgccagacagaatggcgtaaagcggctcagttcgtccggcaatcccaactggagccagagactgataacaaacagcagcaagtaccagaccagatgtcgcccgcgccagttgattggctgagaaaccagactcggaccgagcggcagccaggtgttattggcgagatagtgccagaacaccagacatatcggggccagcgtcaggccgccagttaaagtcagcaacagcgcattccagctctctttgccgtgccaaagccagggcaggctctgcaacaacgccgccgccgttaacgccgccccctgtaacagcaaggtgcgccagtcacgctgatggcgatagcggctgatcagcgctacgggcagtaacgtcagtaaactaccgatcatcaataacggaaaatgggttaaaccgaccgcctgcgttagccagtaaatcagcagccactccgcgcccagcaatacgggccagtatccgcgcgggcattgcagcattagccccagacgcagaccaaacggaaataacagcaccgccatatcagggcgctcaaccagatgcaggctgatactccacaggcaaaaccatgcggcagagaagataaaaaagcaggcaataacggtaattaagcgggagaacaacgtcttcatcaccagccatcaaacatgcggcgcgccagctctacgtcgttactgacgcccagtttttccatcagattggcgcgatggacgtgtaccgttttcggactcaagcccagttcggcggcaatctctttcaccgccattccttgcgccagtttttccgccacctggcgttcacgtttggttagcgggtcctgacgaccggatgccagtttaatggcaatatccggcgtcagataacagccgcccgtggcaaccgtatgcaccgcagcaatgagttcatccgggctacagcgtttggaaagaaagccgcgtgcccccgcgttaagcgcctgctcaaccagcgcaggactgtcgtgaacggagagcataatcgtcgccatacctttcggcagctggcttagcagctccagaccggagatatcgggcatggagatatcgcaaatacacacctgcacaccgcgccccggcagccccgccagcgcctcgcgcccgctaccaaactcggcaactacctgcaaatcaggttccagccccagcagctgcgcaaagccggagcggacgatgaggtgatcgtctataagggcaacggtgatcatggtcttgtcctggcgggtaaaaaaaatacgcgcttaccttaacgataagcgcgatgttgttcaagccttgagcggttactgaaaaaacaccgcgatcttgttaaacatcgtcggatcggactgattacgctgcactttcacgacatcttccagcttatcgatttggcttatcatctgctccagacgctggtcgtcattgaccagtagccagatatggcttttgtcgctgtcctgaatcggcagacaaagaatgccttcaacgttaaaagcgcggcgggcaaaaaggccacaaacgtgggtcattacgcccggatggttgcgaacggtgagctccagaattacgttgtcatgagttgtgttttgcatggcttattcccccaccatttcagtattcgccgcacctggcggcaccatcgggtaaactttttcttcggcatcaatgcgcacatggatcagcgccgggccagggcgattgatgatttcctgcaaactagcctgcggatcggcttcgttattcaaatcacaggtttcgaggccgaatccggcggcaatctgcataaagttgattttgcccggataggtggcggcaaaaacgccttgctcgtagaacagactctgttgctgatgcaccagccccagcgcttcgttgttcatcagaatgattttgacatccagctgattttcactggcggtcgccatctcctgaatattcatcatcaggctgccgtcgccggagaaacacaacactttgcgatccgggttcgccagcgcagcgccaatcgccgcaggcaggccaaaacccatcgtgcccagcccaccggaggtcagccactggcgtgggcgattgagcggataagcttgcgcggtccacatctgatgctgaccaacgtcggtggtgataattgcattgtcatcgacacaggcggcaacggcgttgatcaggccgtaatggcttaacggatcgcacgctttcgggattggacacggaaactcacgctgcaaatccgctaccaactggtgccactctgcacgcggttgcgcttccaccagcgggatcaactgcgccagcacgtcatcaacatccgcctgaatcgccacgtgcggctgcttgattttacccagctctgcacggtcgatatcgacatgaatgattttggcattcggacagaactgctcggttttgccaatcgcccggtcatcaaaacgcgcaccgagcactatcaacaaatccgcctcctgcaaaatatagttggtgctgcgcacgccgtgcatccccagcatacccaggctcaacggatgcgcttttggcaacatgcccagcgccattaaagtcatggtggtaggcagttgcgctttctccgccagttcacgcacccgtgcgggcgcattgatcacaccgccgcccagataaagcaccgggcgtttggcagcgttaatcatcgccgctgcgtcacgaatgctttcttcgctaaaggcgggggcggcggctttttctgccatagcgggctgtgtttcaatctcaaaaactgccgtttgcacatccttaggaatgtctatccacaccgggcctgggcggccactttgcgcaatgcggaaggcatcgctcatgacctgcgggagttcttcgatatgtctgaccagatagttgtgtttggtgatggggatagagatgccgtaggtgtccacttcctggaaggcgtcggtgccgatcatgctggcgggaacctgaccagtgatgcaaatcagcgggatggagtccagccgcgcatcggcaatggcggtcaccaggttagtcgcacccggtccgctacaggccatacagaccgccggtttaccgtcggtgcgcgccattccctgagcgataaagcccgcgccctgttcatgacgggccagaatatggcggatttgcgtgctttggcttaaggcatcgtaaacaggcaggatagaaccgcccggaatgcctgtcacaatcttaatgccctgctgttccaggaaatgaacgataaattctgcgccggtaaagcgcttacgcgtgcttgttgtgccgctacttgccatgctccagtccttttcttctgggccgactttccgggaggtgcttaaacgaaaaaccccgcccggtttgcgccggcggggttttggaatcgtgtgttgttccagtccttacggcgcattgccgacgaccaccaccacacgcacgacgaccactgcggcggatggcgcagttggtagtagttttgcgttgagcatggaagtagtcattggggaccttgttggttttgtgtttaacaatatttatacaagcacagctttacaggggagacaatggaaaatttttcagcaagggaaaattgaggggttgatcacgttttgtactgaattgcagataacaaaaaaccccgccggagcgaggtttcgtcagtcgcctgcggctggtaaccgcaaagcacactgtattatgtcaacactgaaagtatacgtgttccgcgcagaacgcgcaatttcggcacgaattttgacgtatttagtgcatagttgagtatcgatcacagtttgcgttttgtccaaatattactgtttatttatacagtaaacttctataatatcactgtacgcaatgtgttatgcgggggccgcatcgttacccggcgcactaagttctggctgaaacgggtggtgccgtcagcgccttaaccccgcgtgagcacactgtgttatgtcaacaagcacaacgtttctccttgagataccgcgtgcacaacagctggcaacaggcagcggaaaggtacgtcagctggcagtgctcctgaaccacaggagacgcgtatgaacctggtggatatcgccattcttatcctcaaactcattgttgcagcactgcaactgcttgatgctgttctgaaatacctgaagtaattcagattcaagtcgcaccaaaggggagcgggaaaccgctccccttttatatttagcgtgcgggttggtgtcggatgcgatgctgacgcatcttatccgccctaccatctctcccggcaacatttattgccgcttttgtttacatattctgccgctaaacaattccccattcctggcgtatatctggctaacattcatcaatgtgatagattcctctcccgcatttatgggaatgcgtagtgacttattctaattatttttataaaagcatccgtgataatgaaaaggcaaagaaacgtcaatttgttattgatgttggtattactcgtggccgtcggtcagatggcgcaaaccatttatattccagctattgccgatatggcgcgcgatctcaacgtccgtgaaggggcggtgcagagcgtaatgggcgcttatctgctgacttacggtgtcagtcagctgttttatggcccgatttccgaccgcgtgggccgccgaccggtgatcctcgtcggaatgtccatttttatgctggcaacgctggtcgcggtcacgacctccagtttgacggtgttgattgccgccagcgcgatgcaggggatgggcaccggcgttggcggcgtaatggcgcgtactttaccgcgagatttatatgaacggacacagttgcgccatgctaacagcctgttaaacatggggattctcgtcagtccgttgctcgcaccgctaatcggcggtctgctggatacgatgtggaactggcgcgcctgttatctctttttgttggttctttgtgctggtgtgaccttcagtatggcccgctggatgccggaaacgcgtccggtcgatgcaccgcgcacgcgcctgcttaccagttataaaacgcttttcggtaacagcggttttaactgttatttgctgatgctgattggcggtctggccgggattgccgcctttgaagcctgctccggcgtgctgatgggcgcggtgttagggctgagcagtatgacggtcagtattttgtttattctgccgattccggcagcgttttttggcgcatggtttgccggacgtcccaataaacgcttctccacgttaatgtggcagagcgttatctgctgcctgctggctggcttgctgatgtggatccccgactggtttggcgtgatgaatgtctggacgctgctcgttcccgccgcgctgttctttttcggtgccgggatgctgtttccgctggcgaccagcggcgcgatggagccgttccccttcctggcgggcacggctggcgcgctggtcggcggtctgcaaaacattggttccggcgtgctggcgagcctctctgcgatgttgccgcaaaccggtcagggcagcctggggttgttgatgaccttaatgggattgttgatcgtgctgtgctggctgccgctggcgacgcggatgagccatcaggggcagcccgtttaagcgcacgtcaccgcagcatcgtcatcagctccatgggagaacgatgctgctttatcagatcacgcatcacccgcatatgcggtgcggagtaagaataaaacgcctgatagcccgcacaaagcacgctgtctggcgtctcctgccgagcgtgcgggcacaggcgatgccagtcgcacgcctggcagtcacagcgcggttgcgggttttcgctgccacaccatttttgtaaggtggcgtcaaaaagctcaatgctgatacgactgatatctgcccgcacccaacactcgaacagggcaattaaaaatttcccccacagctctgctgtcacgctagcggccgtcagatcgccccggtcatcaaattcaagatagggaatgagctgtacggagcggatgccccgctgtttgaaattgtgataaaaatcggcaggttgcagagcatccttgtactctacaaccagtttatgcctgtcctcttcagcatcaatgacctgacttcctgtcatgcgactctctcaataaatacgataagttgatgtatatgcgttacagcaaacagtattgcgagagataacaccgcgagggagatcaaaaatttgtcacggactacgtgaaattgggaaaaatcgctattcgtgacatccattaaattgcgattacgggtgtagtgccagaggatcagcgccacgatggcgagaatgccaatgctaatccagaataacatgcccgcctggtgccagttgtgtttgatagccaacgccatcaacgcgccgtagcccagcatggtacgaaaccacgccagacttgtgcgctccggctgcagtcctgggtcggcaatgcgtctggctttgcggctatccggcatacaacaccagtcccataacgttaattatccggcatacaacaccagtcccataacgatcaccgccacgaccatcaatattaagctaatgattaataagctgttggtgtagggcaggtcctctttcagacgcatcgctttttcattgcgtaaccagcgcaagtagccatacatcgctaacccgccggaaaacagacacaacaacaacgccagcagttcgcgaatgacgggcgtggcgaaatctggcgcaagttgatcaagcccaacccccgccgccagaaatcctagtgcagtacggatccacgccagaaaagtacgctcattagccaggctgaagcggtaatcaggcgcttctccgaggcgggaaattttcattgttgctcctttgcaatttcactaacgctctacctttagcggtttttttaagaatttcgtccgcccgtttcctgatatgcttttgccatccgctacaaggaggtcagatgggtatcatagctcaaaataaaatcagtagtttgggcatgctgttcggtgccatcgctttaatgatggggattatccactttagtttcggccctttctccgcaccaccgccaacgtttgaaagcatcgtggcggacaaaacggctgaaattaaaagaggtcttctcgccggaataaaaggcgaaaaaattaccaccgtggagaaaaaagaggacgtagatgtcgataaaatcctcaatcaaagcggtatcgcactggccattgctgcgctactttgcgcatttattggcggtatgcgtaaggaaaatcgctggggcattcgcggcgcgctggtttttggcggcgggacgctggctttccataccttgctttttggtatcggcatcgtgtgcagcattttgctgatattccttatcttttccttcctgaccggcggtagtctggtttaagcagcctgaataatgcccgccgggtgatcatcagcgggcattatcgtcagaacttctgttttttctcctccaccttcaccccttgtgtcggtaggccggtgtcatagtcgcgtacaactgggctatagccatcttgtggacgtggacgaaacgccccatccagcgcggccgtgcatctttacgccacggacgcagactccattggtaactgcggaacggatcgcgaattttgtccatgtaatccaataaggcgtcatgcattttgctgcgaacgtctgcaaaacggatatcatcgatcaggttatgcatttcatttgggtcattacggcgatcgtaaagttcatcactggtgaagaggttgagtaccagtttaaagtcatccgtcacccagcaacgcaccggaataaaaccgccaaagctgtcatgctcaatctcgtagcggttaaattccaccatcacgccgcgtggctctttcacggcaaggatattttcccccggcagaatctctggtttttcaatatctgccagcgccatcattgtcggcagtaaatcgatatgactgactggcgtatcgacctgtcgccgctccccttgcgggctacggatgatcagcggaatgcgggtgatgtcgtcatacatcgccgcccctttactgatcagcttatgtgcgcccatcatttcgccgtgatcggaggtataaataacccacgtattttcacgttgctctggcgttaaggcattgatgacccgtccgatttggtcatcaacaaagtcattacaggcaaaatagagcggatggtgataaagcccgtcatcaccgactgggcttggcatcgcctgcgcccataagcggtgatgttccggtttgttagccaggtcatcctgtgctttctcgcccagctcgtagtaaaaatcagcgtatttctctaaatactccaccggacaggtgaacgggtgatgcggctcatcatagctaaccaccatcaggaaaggctcgtctgcgcgcgcaggctgttgcagaaaatccaccgcccgattgctgatacgatgcgcccaggtgaaggtttcgtcgatatggttcgcctgtaaatcttcgacgctgtttaggccattgcgccacaggctaatctctttttccgtcagttcgctaagatagttcgccccatcgaaccagtaatcagcgtcccactccggcggacactcgccagtgccgaaatagtcatgaccgtcgagatgccatttgccgatgtaacaggtgtgatagccggcatccttaaagtagcgccccatagtggagatgtttttgcctggcgcgacgttgttggtccacgggccggactggttagcgtagataccggtaaatagtccggcccgtgcaggcgtacaaaccggactacaggtgtaggcggaattaaagcgaataccttccgccgccagactatcaatattttgcgtattcagcggtttaccgctatagcaaccgaccatattggtggcctgggtatcggtcatgacgaacagaaaattggggcgtttcataggctatccttcccgtcgggagtaaaggttacggctgggtcgtgacgatgccgccagctgtcaaaaatcaggtagacaatcactacggcggcaatgaaataactgatcatcgctaaccagcgcgtaccgtagccgccgaattcagccagcccggcatagacgccaatcatcgcgaacaggatgccaatactcgcgatcttgacgtttttccacggtttcatgtccaccgcaaacgcatctttgaaggtgaacggcgtggcgcgcggtttgataaaaccgatcaccagcatcacgaccacgttgatgcagaacgtacaggccagcacatagaggaaatggaagtcgaacttcaccagatagttgatggtgatgtagctgattatgccaatccccatcgctacttttgccgccagcgccgggatgcgcgggaagaaaaagcccataatgatgatggtaaccagcggcacgttgtaaatgccgttgagctgtttcatccagctatacagcccctgcggcgcgttggcgatccacggcgcgaccagcacgctaacgatagcgataaagaaaccaaatttgcgcccgacggtgaccagctgctgcggctcggcattctggttaatgatgcgacggtaaatacccatactgaataacgtactggcgctattcagaaagccgttgaaggtactgatcaccgcaccaaataacaccgcgccgaagaaacccaccattggcactggcagaacgttattgaccagcgtcgggtaggccatgtcggctttcggtaaatcctgatacagatgaaacgcaatcaaccctggcagcaccagtaccagcgggtcgagcattttcagcaccgccgttaacagcgcccccttttgcccttccgccaggcttttactcgccagcgtgcgttgcacgatgccctgatttgtacaccagtaaaaggtgttcaccagaatcaaaccggtaaatgccgcgccaatcggcaagggatcggtcgggccaccgatactgtttaatttctcggcgtgaacggtggtgagttgctcaatgccctgcataaagctgcccttgcccatcgcgattaggccaaataccggcaccatcaacccgccgataaccagcccaataccgttgatggagtccgccactgccattgcgcgcagtccgccgatcaccgcatacaaaattcccgccagaccaagcaaaattaccagtagccagatagccgcaccgtgagaaatctgtaggctttccccgacgtgaaacaggctgttgagcgccaacgcgccggagtagagaacaatcggcagaaagcagacgccggtggcaattaggaagcagaagtcgatgataatacgcgtcgttttatcataacgttcctccagaaaatcggggatggtggcaatgccgcgcttcagatagcgcggtaaaaagattagcgcgaggaagatcagcgtcaccgcactagtcacttcccagcccatcacgctcatgccgcttttgtaggcctgcccggaaaggccgaccagttgttccgtggaaaggttggttagcattaagctagcggcaataaccggcgcttttagactacgtccggcaagaaaatagccttgttggcttccggtatctgttttgcggaccttccaccaggtgatcaccgccaccagcagcgtaaaaccgacaaaactcaagatttgtaagctattcatctcatagcccttatttatgtttatgtcccggacgcatgaatatagggagaggtaaaatgcgtcgggtcaggcagtcagattcttaaaatacaaacgtcgtatccctgaacggattgttttctgttaagttcaggttgtgagcataattcgccggagggatattaaaatgaatggaaaattgcaaagtagtgatgtaaaaaacgaaactccgtacaatattcccttattgattaacgaaaatgtgatctccagcggaatttctctgatcagcctctggcatacctacgccgacgagcattaccgggtgatctggccgcgggacaagaagaaaccgcttatcgccaacagttgggttgcggtgtataccgtacaaggatgtgggaaaattcttttaaagaatggcgaacaaataacactgcatggcaactgtattatattcttaaagccaatggatattcactcttatcactgtgaaggtttagtctgggaacagtactggatggaatttacccccaccagtatgatggatattcccgttggtcagcaaagcgttatttataatggcgaaatttataatcaggaactcaccgaagttgctgagttaataactagtccagaagcaataaaaaataatctggcagtcgcttttctgacgaaaattatttatcagtggatttgtcttatgtacgcagatggtaaaaaagatccacaacggcggcaaattgaaaaattaattgccactttacatgccagtctgcaacaacgctggagcgtagctgatatggctgccacgatcccctgtagcgaagcctggttgcgtcgtctgtttttacgctataccggcaagacgccgaaagaatattacctcgatgcgcgtctggatctggcgctaagcctattaaagcaacaaggaaacagcgttggcgaagtcgctgatacgctcaacttcttcgactcctttcatttcagcaaagcctttaaacataaatttggttatgcgccgagtgccgtgctaaagaatacggaccagcacccaacggatgccagtccacacaattaacgtaactctggccagtacgctttgttggcctccagcaactcatccagaatagctttggcgacgctggcgctcggtaccgttttgctcaacgtaatcgcctgccacaggtgctgataactacgctgttcccaggcgtccacgaccagtttttccaccgccacttgctgactcattaaccctttctgaaactgcgggatatcgcgctccaccagtggttcaggccgtagtagcgcacgcgcatctgtttgcgatcttgcagcccaacaatttgcgccatccggctttcaataccgattggcatgtcacagatgttgaggattttcgcattcgggcgcagacgacgcgtggcttctgcgacaatggctgccgggttggagtagttgagcatccaggcatttggactatatttttccatataatccaccagttccaggacgccgccaatggaacgcatgccgtacgctattccgccgggtccgcaagtttcctgaccaacaacgccgtggcgcagcgggattttttcatccagttcgcgcatcgggtatttgccgacgcggatgtgcgccatgacaaaatcaacgtcgctgaatgccacttcaggatcggtggtgtaactaaacgcaatgtccggcgctttttctttaaggatgactttacaggcttcggcaatcacttcctgccgcgcaccatcgttatcataaaatttcagtgcacgaagcgggaaacggtcctgattcgccaggagcatcaacacgatgcctggcgtaaaggtgcttccaccgcctgcgacaaccacactgaatttggtcattatactgcctccgtaatggcaacattttctgcactttgatgagaattaattaagctatcgagctgttcacgcagctgagatacatgcagaccaatgatcacctgaatggcatcgccactacggaagacgccgtgcgctcccagctttttaaagacttcgtcatccagcgtttgactcatgtcatgcagtgcaatacgtaaacgcgtcgcgcaattgttaatgctggagatattgccgaccccgcccagggcttgcaggataccggcagcctgatccagctcttttttttggctctgccgcggtggtttggcctcggctggctttgtattcggctttactgtagagtttcacttccgcatcttcacgtcccggcgtgcacatgttgaactgcagaatcagtgtgcggaaaaccacgaagtacagcagggtaaagcacaacccaatggcgatttgggtcagcatcatatccgcgtggttgctgaacatcgggatccagttttgcggtaaaacttagtcaatcagacctccgcccatgttgcccaccacaccaaagagatacattacggtgctcatactggccgccagcacggcgtgtaccgcaaacagcaacggactaatgaacaggaaggtaaattccagcggttcggtaattcccaccagcatggcggttaaggttgcgggaatcagcaagcccgccacttttacccgattttccggtgcggcagtgaagtacatcgctaaagaaatgcccacggcaccaaagattttactgttaccgtgcagggcaaaaccgccttccgggaacaagcttttcagcggctcggcgctcaaactgaactcttgcagatgctgcgcccagtacatctgaatgccgccttcaacagctgccggaccaaagataaactgtccgtagatgaagtggtgtaaaccggttgggatcagaatacgttcgaggaaggtgtaaacccagaccccaagtgcacccgcgctacgcaggaacgcttgcagagattcaatccccatttgtacttttggccagccgagcaacgtcagccaggcacaggggatcatcaccaggaaggcgataatcaccacataagacgtcccctggaaaatgccgagaaaaaccggcagttttttatcgaacagacggttatgcagcgccgtcacaatgccggaaatgataattgcgccgataatgctggtatcgagggttttaatcccggccatcattgtcagaccgctacctgccaccgcgtcctgagtgaaatcgacgccgaagtagcttccccaggccattcccatcgcgttgatgaaatagttccaggtcaggaaactcaccatcaccgccagacaagcacgcccctgcgcttgcttagcaaggccaatgggtaaaccgacagcaaaaatcagcggcatattacggaataccgtccaaccgccctcttcaataatgtgtacgatttgcgcgaataaactgttcggatcggtcagactttccccgacaaacatcgggttttgcagcaagatggcaagacccaccacaatcccggcgaagggaaacagcagcactggcgtgaacatcgcgccgccaaagcgttgaatttgactgagcatttccacatcctcttttctcaattctgtaagtaggaagcctgattggttatgcggcaggcctggagcgaggataggaagatgcgatcggcagaacatgacgacccaatgggattcgtgatcgctttcatgcttttcgttgggcggtagagatctacgttttcgcgaaaaagtagacctctgtgagcacaggtacacagcatcgaacacatctttaaaaaaaagatgttttttcaatcgattaagcagaacttgtgtgcgcattacccgggcttgcaggcaaaaaagagatctagagatgatctacaaaagcattgcggagcggttaagaattcgacttaactccgcagatttcacgctaaacagccttcttcccggtgaaaaaaagctggcggaagagtttgcggtaagccggatgaccatccgtaaagccattgacctgctggtagcgtgggggctggtggtccgccgccacggtagtggcacttacctggtgcgcaaagatgtactgcatcaaaccgccagtctgaccgggctggtggaggtgttaaaacggcagggaaaaacggtcaccagccaggtgctgatttttgaaatcatgcctgcgcctccggccattgccagccagttacggattcaaatcaacgagcagatctacttctcccgtcgcgttcgttttgtggaagggaaaccgctgatgctggaagacagctatatgccggtaaaactgttccgtaatcttagcctgcaacatctggaagggagcaagtttgaatatattgaacaagagtgcgggattttgattggcggtaattatgaaagcctgacgccagtgctcgccgatagactgctggcgcggcaaatgaaggtagcggaacacacgccactgctgcggatcaccagcttgagttatagcgagagcggggagtttttgaattatagtgtgatgttcagaaatgccagcgaataccaggtggagtaccatttacggcgactccacccggaaaagagttaaccgatactccagaagagcaccgccagtaattggggggtgataatgcgcaggaacattaccaacggatagacagtggcgtaagagagcgccgccgcaccgctggttggatgaagattattagcaaacgccagcgccggaggatcggtcatggaacctgccagcatcccgcacatggtcaggtaattcattttggctaacatccgcgccagaatgccaacagtaatcagcggaacggcggtgatcagggcaccataaccaatccagcttagcccttcgccattgaccagggtattcacaaaatccccaccagatttcagaccaacgacgctgaggaacagcacgatccccagctcccgcagcgcgaggttggcgcttggcggcataaaccagtacagcttgccgatactgccgatacgcccgaggatcaacgccataatcagcggtccgcccgccagccccagtttcaacgcggccgggaatcctggcacaaagacgggaatagaacctaacaatacgcctagcccgatgccaataaacactggcagcatctgaacctgttgcagtttttgctgcgcattccccagcacattggcaacggcatcaattgcggacggacgccccaccagattgaggatatcgccgaactgcaggctgatatcgccactggcgaccagttcgaccccggcacggttcaggcggctgataacaacgtcatagcgttctttaaagtgcaggtcgcgaatacgttttccgagcacgttttcattggtgaccaccacacgctcgacgcgcaaatcagtgcctttcgtggacaggctagtatcgacctcctgaccaatcaccagttgcgcattatgtaaatccgctggctgacccaccagatgcagcaaatcgcccagttggataatggtatctgggctaggaacttttagggtttcttcgcgtttcagacggctgcagataattttgtcgccgttgagaatcggtacatctttaatggctaaatcatgcaggttagggttctcaacgcgaatattgatagtcttgatcagcgcgccgccattggtgcgactagactcgtgctgctgagcttctgtctcgacattgacgcggaaaataacccgcaacatccacatggtgaacaaaatcccgcaaatgccgaatggatacgccatcgcgtaactcatccccatctgatcgaccatttccattggtgtacccaggtcgcgcaaaatctgctgccctgcccccagcgctggcgtattggtaaccgcaccggagaaaatccccagcactaccggcagtggaatatcaaacagtttatgcaggatggcggtaaccagaccaccgatgatgacgatcagaacagcaaacaggttgaggcgtaatccggagacgcgcaaactggcaaagaagcccggccctacctgaatcccgatagtataaacgaacaggatcaggccaaattcctgaataacatgcagcatatcgctacttaatgtcatccccgcctgagaaacaaaatggccgacgatgatcccaccaaacagcacgccgccaatacctaatcctatgccgcgaaatttgacgttgccgataaacaaaccgacgactgccaccaaagccagaatactgaccgttaatgctatatcactcatcgtccatttctcttgagataacattttaattgctacggattatggctgaatcggtgaagcagatttgccttatagcgcacattatcacgggaaagaacgtgccgaaatatcttaaacagtcgaaatttaacgcattgttgagtaagtaagacaaaaaaagccccaccagaatggcggggcaaagagaatagctagttagctatttaacgcgggacgttcgctgatagcgatacgctgcgctgcgatgggttcaggctcattacgaattaaatcaatatgcagtaaaccgtttacgaaggttgcgccagagacttccatattttcagccagcgtaaagctcaggctaaatggctgattcataagcccttgatgcagccattttttctcttcttttggctgctccggcgtgccttttacgctcaggcgcgtaccttccagttgaatctctaaatcttcctgacggaaacctgccagcgcaagggtaatgcggtagtggttatcgtcgcttttctcaatgttgtacggcgggaagctctggctttcaccggcgttttgcagtgcgttggccagtttgtcaaaaccgatccattgacgcatcagtggggataaatcgaagttacgcatagtcatttctccttctaagaagcgagtaagtacctgcaaatccgaagattcgcatatgctccctgacggcgagcatggagatgtcaggccgcgccaggcggccttagggaattagttgatttcgatacggcgcggttttttcgcttccggaatcacgcgttcgagatcgatatacagcaaaccatttaccaggttagcaccacgaacatgaatgttctcagctaactggaatttgcgttcaaagttgcgttcagcgatgccctggtacagataggtgcgctctttttgttcgtcggcgtgagcacctttcaccaccagcagattatcctgggcggtaatttccagttcgctctcagcaaaaccagccacagcgatagcaatgcggtaatggttttcgtctaccagttcaacgttatacggagggtagccgccattactctggctctggttgttttctaagtggttaaacaaacggtcaaatccaatagcagaacggtaaagcggggataaatcaaagttacgcataatcaatagctcctgaaatcagcgagaatgtaagaccttccacaatggacaggtcaggtagccagaacacccatcaggcgcgtcctcatcggctacgatgtaaaaatgggtctggaaatgaacttttcaagccttatcagcggacttttttttgcagtttatggtctattgcatagactgagggggcagcacgaaacgttaaagtgcgatagccgccacagtgcgacgtaatgatgatgttattttcagcaagggatcgctataactcatcaggccaacacccacgatcaacagatgaatttattatgataagaaatgtgttgttagcgttcatgatatgcagcggaatgacattactcggaggatgctccagcgtgatgtcccataccggagggaaagaaggaacgtatcccggcacccgcgccagcgcaaccatgattggcgacgatgaaaccaactggggcactaagagcctggcgattctcgatatgccgtttaccgctgtgatggacacgcttttactgccgtgggatgtgttccgcaaagacagcagcgtgcgcagccgcgttgaaaaaagcgaagccaacgcgcaagccaccaatgcggttattccaccggccagaatgcctgataactgatttagcgatcagtttcggtgatccacagctggccgccttccatccacgccagccactgaccatccgggctgaagaccacggcgtccgcagaaggactattggcgtggtgttcggttaaatactcaacctcgccgctttgcgcatgggcacaagcaattcgattatccagcacaaagcccaaccattctccactcggatgccagttaaatgcagactgaatatccgttttgttatgggttaactggcgcggctcgccgccctgtgggctgataagccacagttgcacaatgccgttatcatctcgcattaaaaacgcgatttgtgtaccctgcggattacagcgcacccagtggcgcgggacgttgactaaccccggataagcccgatggtgggtaaaggttaaacgtcgctgcacgacgccacgcggtggcgcgggcagggttgtttccgttccgcttaacggcgcatcacctgccgctttccagccagcttcatcttgcggtaactcaacgataaacagctccggcactttctcgccctttgggctaagtgtgtcgccaataaatgccagcgcgtgatttcctacccatccttcttcataagcacgattgatttcatcactgccaggctgtggcgtgggcgtggttttgctcaccagcacgcaccagtggctaccgctgtattcacgcggatgctgcttttgtacgttgaccgggccaaacggcgcagcaacaccgacgtttcgcaaatccagcgccggatcgagttcatgcattacatggtcgttataggtaaagctcaccctttcaccgttcgggctaaagacatgcacatggctgccgccgcgcagcactcctggcgtatacggcgcggtaatatccatcgcatcaaggttactcatcttgccgccttcaacaatcactccgcgccgatgatggaagtcgtaatgccatgtttcatcaggattttccgggccgtggatgaaaacatatttctcactcttcggatgaacggtcaccacgccgacgtgtgcgccctgactcgcgcgatagataacctcgacctcgccggtatggatattcacacgctcaatggtctcgccggtaaagctcgcgccagaaggacgcacgtcaaataccagccactggctgtcgggcgtccaggtattggtattggtgagcaggtgattacggggagcaaaggttatctgtttcatggcgcggtcctgatacaaaacgggtcccgccatcatacttcacaaggacttcactttcagacaatagtcttttgccatcgtgatgaatgtgagtgaaaagatggaacatttcgacgtggcgattattggcctcggcccggcaggaagcgcgttggcacgaaagttagcaggcaaaatgcaggtgatcgcgctggataaaaagcaccagtgtggtactgaaggtttcagcaaaccctgcggcggtctgctggcaccggacgcgcagcgatcttttattcgcgatgggctgacgcttcctgtcgatgtgatcgctaatccgcagattttcagcgtcaaaaccgtcgacgtcgccgcaagcctcacgcgtaactaccagcgaagctatatcaatattaatcgccatgctttcgacttgtggatgaaaagcctgatccccgccagcgttgaggtttatcacgacagcctgtgccgaaaaatctggcgtgaggatgataaatggcatgtcatttttcgtgcagacggctgggagcaacatattaccgcccgctatctggtcggtgccgatggcgcaaacagcatggtgcggcgacatctctacccggatcatcaaatccgtaaatatgtcgctatccagcagtggttcgcggagaaacatccggtgccgttctactcctgcatctttgataatagcataactaactgttatagttggagtatcagcaaagacggttattttatctttggcggtgcctatccaatgaaagacggtcagacgcgtttcacgacgctgaaagagaaaatgagcgcctttcagttccagtttggtaagacggtgaaaagcgaaaaatgcacggtgctgtttcccagccgctggcaggattttgtctgcggtaaggacaacgcctttctgattggtgaagcggcgggatttatcagcgccagcagcctggaggggattagctatgcgctggatagcacagacattctgcgtagcgtgttactgaagcagccagagaagctcaataccgcttactggcgcgccacccgcaaactgcgtttaaaactcttcggcaagatagtaaaaagccgatgcctgaccgcaccggctttaagaaagtggattatgcgcagtggtgtggcacatattccacagttgaaggattaaccaacgcgcttcacatcgcccaccagcaggatataagagagcgcgccaatcaacgcgacggcggagatataaaccagtgcaggtgcgaaaccgtaaccctgcgccaggtaccccaccaccagcggaacggtgatgccgcccagaccaccggcgaagttaaacacgccgccggttaaaccaatcaggcgcatcggtgccagagaagaaaccaggctccaggtaatgctagcaaaaccgttaccgaagaatgccagcgccatcaggcacataatcatcatcggatcgttagtgtagttagcgcccataatgcaggtggagatcagcaagccgcagataatcggcgttttacgcgcaaagcccagactaaagcccttacgtaccagcagatccgctacccagccagagagcaggacgccgacaaacgccgcgaggaatggcaccgtggtcataaagcctgctttcagcgccgtgattcctttttcctgggttaaatagttcgggaaccaggttaagaaaaaccacagtgtagaagccaccgcaaattgcccaagataaacgccgatcagtttacgatggaacaccagtttccagtctttggctgttaacggctgacgcgcctctttcttcaccggcgcatcaccatccaccagaccgccgccatcacgaatgtaatccagttcagctttgctgatacctttggtcaggcgcggcggctgataaaccttaaaccaaatcaggctccagataatgccgataccaccagtgacaatgaacacccagtgccagctcaacatctcctgaatccagatcagcagcggcgtcagaaacgccagaccgacaaactgaccagacgtataaaaaccaacggcagaagcgcgttcatgttccgggaaccagctggtcaccatccggttattggtcgggaaagcaggcgcttcgaaaataccggttatcgcgcgcagaccaattaaactcattaagcccgtggcaaagccctggaataaagtcgccacactccagccaaatatcgcaataaaataagtcacgcgagaacctacgcgatctaaaaaccaaccgccggggatctgacatagcgtataaagccaggcgaaggcgctaaatacatagcccatttccgctttggtaatgccgaactcttcctgaatatgggcggaagccacggccaggttggcgcggtcgacataacaaatgactaccgtaataaagatcatcaccagcgtcagataacgccgacgccccggctttgctgcattaacgggaatatccatagcgagctttctccagattttgggcatagcgaagccgctcaccatgccctgtaatttacagagggttatatttttgtattgctgttttagtgcccgatgaggggcttacgtggcaggaattaccactctgctacgctgttatcttcatgacgccagagcggattacgccagtccggggcatttttactgaactcaatcactttagcttcgtcgatttccacgcctaagcccggtttcgttaacggtttaaagaagccgccgaccatgctgaagtcttctttgtttttcacaaagtcgagtaactccgcgcctttgttgtaatgaattcccatactttgttcctgaagtacggcgttataggaaacaaagtcgatatgcaggcaagccgccagtgcaatcggtccgagcggacagtgcggcgcaagggtcacgtcataggcttctgccattccggcgattttgtagcattcggtaataccgcccgcgtgggagagatccggttgcagaatgctaataccacctgcctccagcacgcgtttaaaatcgaagcgactgaacatgcgttcacccgccgccagtggaatatgcgtttgtgccgccagtttcgggtagtattcggcttgttccgccagcaccggctcctcaataaacagcgggcgatacggctccagttctttaatcagcactttcgccatcggcgcgctgacgcgaccgtggaaatcaagaccaaactcaatctgattgccaaaagcttcacgaatttgtgccacggtgttaaccgccgcatctaccgcgcgggagttatcaattagccccagttcttcacaaccgttcagtttgaaggtatcgaagccgatttcgcgtagcgttttaatgccgtcgataacatccgccggacgatcgccgccaacccaactgtaggctttaattttgtcgcgaaccaggccgcccatcagttgccagaccggcgcattcagcactttacctttgatatcccataacgcctggtcaatcccggcgatggcgctcatcaggatcggaccgccgcgatagaatccggcgcgatacatcacttgccataagtcattgatgcggcttggatcctgaccaatcaaatagtcacccagctcgtgaactgccgcttccaccgtacgggcgcggccttcgatcacgggctcgccccaaccgaccacgccttcatcggtttcaattttcaggaacatccagcggggaggtaaacgatacgtggtaattttggtgattttcattgcactgcctctcgatacgccttaacaaatgctgctgcctgctgcgcggtgcgctctacggattgcccggcgcgatagagatcgctgcctaagcccgcccctgcacaacctgcgtctatccactgcgccaggttttctggcgtcacgccgccaacggcaaagactgcgatgtcgcttggcaataccgcttttaacgctttgatgtattgcggaccaaaagcgctactcggaaatattttcagcgcctgcgcgcccgcttcgagcgcggtaaaggcttcggtcgccgtcgcgcagccggggcagacggtcatgccgtagcccaccgcacggcggatcacttcactatggatattgggcgtaacgatgagctgacagcccatcctggcgagcgcatcgacctgttcaggtttcagtaccgtacctgcgccaatcaacgccttgtcgccgtacgcatcaacgatggcgggaatgctttgctcccattgtggggaattcagcgggatttcaaccgcgtcgaacccggcgtcaatcaccgcgccaacatgcgccagcgcctcgtcgggcgtaataccgcgcaaaatggcgatcagcgggagtttagtttgccactgcatgagcgatgctccttataccagcctgaaatgccgtgtcgcccgccaccgccgtcacgtcgcaacccatcgcctgaaaggcttgctggtagcgcgcggtcaggcttgttccggcgacaagggtgatggcgtgttgatgggccacatagtcgcgcatactggcgacctctgcgccaatcaacaaaccagagagaaattcgctgacctgttcgcggggaagtgttcccagcacatggctggcgcgaacttcaaaaagctgcggcaatatggcgggcgtattaagaccacgctcaaggccagctgtgaaggcatcggcagagttttcctgcggcggcaaacctgcgccaatcaaactgtgatttaacagtaaatgatgtaattcaccggtcatcacggtgcgaaaatcgttgatttgctggctatcggcctgcacccatttgcaatgggttccgggcatgacataaagagaggaaggagccagagctcgcgcgccgatcaattgtgtttcttcgccgcgcatcacattgtggttatcgtcatgagagacacataatccgggaataatccagatattgtcgccaacactcgttaattgttcgccaatagagctaaaacaggcaggaacagataaatacggtgcaactttccagccgacgttgctgccaaccattcctgccattaccactggcgttttctcttcacgccagtcggtcgtgacttctgctaacaccgcagccggagattttccgttcaggcgcgtgacgcctgcttcactttgcctgctctccaggcagtggtcgccctgataaagccaggcgcgcagattggtgcttccccagtcaattgcgatgtagcgagctgtcatgtgatttcctttaaccttcgtgtgctgctggcgatcatggtaagcgccgcctgctctgccgcatcgccgtcctgatgtcgtatcgcatcgaacagcgccttatgttcctggagcgtttgcggcatgttggcctcatcgcccatccaggttcgttcaaaaaccgcccgctgcaggctactgatcgcaatgctaagttgctgtaacaccgggttatgcacgctctgcagcaccgcctcgtggtagcgaatatccgcttcgttaaacgcttcgcggtcctgattgttggcaatcatctcgttcagcgcgctttcaatctgcgccagatcgctggaagtcgcgcgctctgctgcccaacgggcaatcgccggttccaccagatttcgcacttcgctcatggcactgataagccgtgggtcgtagtcattttccagcacccattgcagtacgtcagtgtcgaggtaattccactggttacgcggtgccacaaacgccccgcgataacgtttcatttcaatcagccgcttcgccatcaggctacggaacacctcacggatgatgttgcggctggttgcaaactcctcacagagttccgcctcagccggaagcgggctgcctggcacgtatttgccgtgaacgatctgtttacccagcgtaatgacaatgcgatcggttttattgagagtcatggagagtccttgtgctctgtatgttcttctctactttaccccgatcgatgcataacgcggcaactttgtagtaccagcgtgatgacgttcgcgtttgccgtgcgtgtaatgtagtacaaacttatattgttgtactacaatttagatcacaaaaagaacaatgcataaaaaaatgacatgcgtcgggcagaaatctgaaaagggatatcaggcgctaaacaggagggaaagaagagtatgctttcaacggcttagctactcgtttaaaggattaatcatgaagttgaattttaagggattttttaaggctgccggtttattcccactggcgctgatgcttagtggctgtatcagctatgctctggtttcccataccgcaaagggtagtagtggaaagtatcaaagccagagtgacaccatcactgggctaagccaggcaaaagatagtaatggaacaaaaggctatgtttttgtaggggaaagcctggattaccttatcactgatggtgccgatgacatcgttaagatgctcaatgatccagcacttaaccggcacaatattcaggttgccgatgacgcaagatttgttttaaatgcggggaaaaagaaatttaccggcacaataagcctttactactactggaataacgaagaagaaaaggcactggcaacgcattatggttttgcctgtggtgttcaacactgtaccaggagtctggaaaacctaaaaggcacaatccatgagaaaaataaaaacatggattacagtaaggtgatggcgttctaccatccatttaaagtgcgattttatgaatactatagtcccagaggcattccggatggtgtttccgcagcattactgccagtgactgttacgctggacatcattactgcaccgctgcaatttctggttgtatatgcagtaaaccaataatcagtaagcgggcaaacgcgtttatgctgtttgcccgcccacagattaattcagcacatacttctcaatagcaaacgccacgccatcttcaaggttagatttggtgacaaagttcgccacttctttcacactaggaatagcgttatccatcgccacaccgacgcctgcatattcaatcattgcgatatcgttttcctgatcgccaatcgccatgatttcttccggtttaatacctaacacgtcggccagacttttcacccccgtacctttgttaacgcgtttatcgaggatttcgaggaagtacggcgcacttttcagcacggtatatttctctttcacttcctgcggaatacgcgcgatagcctggtcgaggatggcgggttcatcaatcatcatcactttcaggaactgggtattggggtccattttctccgcttcgcagaacaccagcggaatggtggcaacgaaggattcatgcaccgtgtagtagctgatatcacggttggcggtgtacagcgtggtgcggtccagggcgtggaaatgagaaccgacttcgcgagagagtttttccaggaaacgatagtcgtcatagctgagagcagtttgcgccacggtgctaccatcagcggccttctgtaccagcgcgccgttataagtaatgcagtagtcgcccggctgttccatatgcagctctttcaggtagttgtgcacacctgcatacgggcgacccgtcgttagcacgacattcacgccacgggcgcgagctgcggcaatcgcatttttaacggcgggactaatggtgtgatcgggcagcagaagggtgccatccatatcgatagcaatgagtttaatagccatgagttccccaggtagattggttcctgacccatgctaacgcgattccgctcaaaaatcagtacaacacccgagggaaaagggggatgcaacgcgcgttgcgtgctccctttttgcttagcggaagagtttccctttcagcagttccatgcctgcggaaagcagatcgttattggcttgtggactcacttcaccttgcggactgagcgcatcaataatcttcggcaattgttctgccagtaaactggaagctgtactggtatccacgccaagtttttgcccgagatcggacaccgcatttgtgccgagcgcgctttccagttgctcgccactaacgctttgattgccctgttgattactcagccaggtactgagaatggcccctaagccgccactttgcagtttttccagcagcacctgaatgccgccctgctcctcaacccaacttaaaatagcctgatatttccccgcatcgcctttcagaaaggcaccgacaacttcatcaaaaagccccatgataatcacctgtaaagcgttacgtgttgacccaaaaagtatagatttgcgggatgataattgcggattgcagaaataaaaagggcggagatgatctccgcccttttcttatagcttcttgccggatgcggcgtgaacgccttatccggcctacaaaatcatgaaaattcaatacattgcaagattttcgtaggcctgataagcgtagcgcatcaggcacgctcgcatggttagcgccattaaatatcgatattcgccgctttcagggcgttctcttcaataaacgcacggcgcggttcaacggcgtcgcccatcagcgtggtgaacaactggtcggcagcaatcgcatctttaacggtaacgcgcagcatacgacgactttccgggtccatagtggtttcccacagctgttccgggttcatctcgcccagacctttataacgctggatggagaggccgcgacgggactctttcaccagccagtccagcgcctgctcgaagctggctaccggctgacgacgctcgccacgttcgataaacgcatcttcttccagcaagccacgcagtttctcacccagcgtgcagatacgacgatattcgccaccggtgataaactcgtgatccagcggatagtcagtatccacaccgtgggtacgcacgcgaacaatcggctcgaacaggttttgctcagcattggtgtgaacatcaaacttccactggctgccgtgctgttctttgtcgttcagttcgctgaccagcgcgttcacccagcgggtaacggtctgctcatcagaaaggtcagcttccgtcaacgtcggctgatagataagctctttcagcattgctttcggataacgacgctccatacgattgatcattttctgcgtcgcgttgtactcagataccagtttctctaacgcttcgccagccaatgccggtgcactggcgttggtgtgcagcgttgcgccgtccagcgcgatagagatctggtactgatccatcgcttcgtcgtctttaatgtactgttcctgcttgcctttcttcactttgtacagcggcggctgagcgatgtagacgtgaccgcgttcaacgatttccggcatctgacgatagaagaaggtcaacagcagcgtacgaatgtggctgccgtcgacgtccgcatcggtcatgatgatgatgctgtgataacgcagtttgtccgggttgtactcgtcacgaccgataccacagccaagcgcggtgataagcgtcgccacttcctgagaagagagcatcttatcgaagcgcgctttctcgacgttgaggattttacccttcagcggcagaatcgcctggttcttgcggttacgcccctgcttcgcagagccgcccgcggagtccccttccaccaggtacagttcggaaagcgccggatcgcgttcctggcagtctgccagtttgcccggcaggcccgctaagtcgagcgcacctttacggcgggtcatttcacgcgcgcgacgcgccgcttcacgggcacgggcagcatcgataattttgccaaccacgattttcgcgtcggttgggttttccagcaggtattctgccagcagttcgttcatctgctgttcaaccgcgcttttcacctcagaagaaaccagtttgtctttggtctgggaggagaatttcgggtccggcactttcacggaaacgaccgcaatcaggccttcacgcgcatcgtcaccggtggcgctgactttggcttttttgctgtagccttctttgtccatgtaggcgttcagggtacgggtcatcgccgcacggaagcctgccaggtgagtaccgccgtcacgctgcggaatgttgttggtaaagcagtagatgttttcctggaagccatcgttccactgcaacgccacttcgacgccaataccgtctttttcagtggagaagtagaagatattcgggtggatcggcgttttgttcttgttcagatattcaacgaacgccttgatgccgccttcatagtggaagtggtcttctttgccgtcgcgcttgtcgcgcagacgaatggaaacgccggagttgaggaagctcaactcacgcagacgtttcgccagaatttcatattcgaactcggtcacattggtgaaggtttcgaggctgggccagaaacgcaccatggtgccggttttttcagtctcgccggtaaccgccagcggggcctgcggtacaccgtgttcgtagatctgacggtgaattttaccctcgcgctggataaccagctccagtttttggctcagggcgtttactacgctaacaccaacgccgtgcagaccgccggacactttataggagttatcgtcaaatttaccgcctgcgtgcagaacggtcatgatcacttccgccgcgcttacgccctcttccgggtgaataccggtcggaatgccgcgcccgtcatcctgtacagagacagagttatcggcgtgaatggtgacgataatttctttacagtgacccgcgagcgcttcgtcgatagcgttatctaccacctcgaataccatgtggtgcagaccggtgccgtcatccgtgtcgccgatatacatacccgggcgcttacgcaccgcatccagccctttcaggactttgatactggaggagtcataagaattgctcatcaacgtttctcgctcatttatacttgggttaatccgttattttacccttttccacggtaaacatcttgctattttcgtcgctcatgtctataacgtgttcagcactgatcgcgctgacaaagacctgactttgcgtcgcttttaagcggctggcaagcagcccgcgacgctcatcatcaagctcagaggcaaaatcatctatcaggtagagacaccgccgcccgctttcacgggtgaggaactctccttgcgccagacgtaaggcgcacatcaacagcttaagctgcccacggcttaaggtatcttccaccggcgcaccgtcggcgcgaatgcgtaagtccgctttgtgcgggccgtgcgcggtgtaggttagctggcgatcgcgttcaaaattacgttccagcacctcagcatattctgtctctttctcccagccgcgctggaaagagaaagtcagagaaaactcagggagaaattgcttacaggtatcagccatatcggccgcgataccggcgctatactccgcgcgccaggtgctgatttgctccgccagcgggatcagctctttatcccacgggcgtagctgttcgtaacgtgtcacctggcgcagcgccgcattgcgctgcttgagcaatcgcttgagattgctccaggcggtgaaaaatccgggttcgttgtgaaagcatccccagtcgaggaatgctcttctgtatttggggccgccgttgagtaaagtaaacccttctggcgttatcaactgcattggcatcaggtgcgccagttccgcgaccttatgcccgtctgtaccgtcgatgcggactttgctgtcgccctgtttgtctttggttaagccaatcgctgtctcgcgctcttcgccctgtaatcgcccgtggagaacaaacgcctcctgctcatggcgaatgacgcgaccaatctgcaaactgcgaaacgcccgaccatggccgagcgtatagatggcttccagcacgctggttttgccactgccgttggcgcctaccagaaagttaaagccgggagataaggcgagatccgcggtttcaatgttgcggaaatcgcggatcaacaagcgggtgagggacattacagtctcattggcatgacaacataagccgcgctctggctggccgcatcttcaatctgcacgctggaaacgctatcggtcagcatcatgcggacgttttcgcatttcagcgcgttcagaacatccagcacataactgacgttgaagccgatttccatctccgcaccgctataggtaacgtcgaggatctcttccgcttcttcctgttccgggttgttggcggtgattttcagctggttttcgctgacataaagacgtacgccgcggaatttctcgttagagagaatcgccgcgcgagcaaacgcctgcttgagcagatcgcagccagcttccagatgtttgtccgggttcttcggcagaacgcggcgataatccgggaagcgaccatccaccagtttggaggtgaagataaagtcgccaacgtgggcgcgaatgttgttgctgccaatctgtacgcgcagcggattgtcgccgccgtcgagcatacgcatcagttcaatcacgcctttacgcggtacgatcacgctatggcttggcaaagattgaccaattggcatactacagaccgccagacggtggccgtcggttgccacggtgcgcagttcttcaccttcggtttcaaacagcataccatttaagtaatagcgaacgtcctgatgcgccatagaaaactgggtcgcttcaatcagacgcttcatcgttgcctgcggcagggtaaattcgacttcactctgccagtcatcgaggttcgggaaatccgccgctggcagggtagacaggctaaaacggctacgcccggagcgtaccagcatccgttcaccttccagctgcacggcaatttccgcgccttcaggcagaccacggcagatatcaaagaatttgcgcgccggaacggtcgtcgctcctggctcgtgtggctgaaccagcgcaacacgtgccaccatttccatctcgagatcagtaccggtcaggctcaacgtaccgtcagcaacctgtaacagcagattaccgagaatcggtagcgtaggacgaccacctaacggaccgctcacctgttgtagcggttttaataaatgctcacgttctacggtaaatttcataggtttagctactcaatgttctgattaaattactaaaatcttctttgatatcgtggctctcttcacgcaactgctcgatcttacggcaggcatgaagcaccgtcgtgtggtcacggccaccaaacgcatcgccaatctccggcagactgtggttagtcagctctttcgccagcgccatcgccatctggcgcggacgcgccacgctgcgggatcgacgcttggaaaggagatccgcgactttgatcttgtagtactccgccaccgtcttctgaatattgtcgatggtgaccagtttttcctgcaatgccagcaagtcgcgcagcgcctcacgcacgaagtcgatggtgatcgcccgtccggtaaagttggcattggcaatgacgcggttcagcgccccttccagctcacgtacgttagatcgtagacgcttggcgataaagaacgccacttcgcccggcaaacgaatgtcgttttcgtcggcctttttcatcaggatcgccacacgggtttccagctctggcggttcgatcgccacagtcagtccccaaccgaagcgggatttcaaacgatcctcaacgccgttgatctctttcggatagcgatcgctggtgagaatgatctgttgattaccttccagcagggcgttgaaggtgtggaaaaactcttcctgagatcgttctttattagcaaaaaactgaatatcgtcgatcagcagtgcatctacggaacggtagtagcgtttaaactcttcgatcgcgttgttttgcagggctttaaccatgtcctgaacaaagcgctcggagtgcatataaaccactttggcattcggcttgcgcgccataatgccgttacccaccgcatgcagcaggtgagttttacccagacccgtgccgccataaaggaacaacgggttataggcaccgccagggttatccgccacctggcgagccgccgcgcgcgccagttggttagatttaccttcaacgaagttatcaaacgtgtgtttgacgtttacgttagaacgataggtcggttctgccggggccgggacgttatcccaaccactgcgcgtagaaggcgcagcacgttgcggctgcgtttgcgccacctgtgcaggggccgcgacgttgctcgtcactgccgcttgtggcgtttgcgtcaccggtttggtgccgacttcaaaacgcagctgtggggcatccgctccgcagaaactggttagcagtccattgatattattaaggtacttgtcccgtacccaatcgaggacaaaacggtttggcgcgtacagggccagcgtgttatcgctcagttccgcctgcaatgggcgtatccacatactgaattctgtggctggtaactcatcctgcaatcgggcaagacactgctgccaaaggctaagactcacggcggactccactcgaacaaaagtcgataatgactaaggctgaaacattcatgattgttgacgtacgtcgaaaagaccctgcttgagggtgacgcacgaaccgctgtctgcggttatatgcccgatcaagatcctgcaaaacgatcgggaccgcggatcatagcctaaactgcgcaagagatcttctgtttctcacagattttcccgatttatccacaggactttccagaactcgctaagtgtaaacgatcctgccgcgaggcgggcacgatttacgccgcatattggaaaatttaatgaccatagacaaaaattggcttaatcgatctaataaagatccaggacgatccttgcgctttacccatcagcccgtataatcctccacccggcgcgccatgctggtttccactggtgtgaggtcgtacattttccctgcgaaaaggtgcggaaaagcgcggtaaataaggaaagagaattgactccggagtgtacaattattacaatccggcctctttaatcacccatggcttcggtgtccatcgtttcatttttcggcggatatccaataaagccattgaatttattcaagtttaggtagaaatcgccatgaaacgcacttttcaaccgtctgtactgaagcgcaaccgttctcacggcttccgtgctcgtatggctactaaaaatggtcgtcaggttctggcacgtcgtcgtgctaaaggccgcgctcgtctgaccgtttctaagtaataaagctaacccctgagtggttaagctcgcatttcccagggagttacgcttgttaactcccagtcaattcacattcgtcttccagcagccacaacgggctggcacgccgcaaattaccattctcggccgcctgaatagcctggggcatccccgtatcggtcttacagtcgccaagaaaaacgttcgacgcgcccatgaacgcaatcggattaaacgtctgacgcgtgaaagcttccgtctgcgccaacatgaactcccggctatggatttcgtggtggtggcgaaaaaaggggttgccgacctcgataaccgtgctctcagcgaagcgttggaaaaattatggcgccgccactgtcgcctggctcgcgggtcctgacttaatcggaagcgttggaaaaattatggcgccgccactgagccctggcagccgggtcctgatagccctcattcgggtctatcaacgcctgattagtccgctactcgggccgcattgtcgtttcactccaacctgtagtagctacggaattgaggcattgcgcaggtttggagtgataaaaggcagttggttgacggtgaaacgcgtattaaaatgccaccctttacaccctggtggtgacgatcccgtcccgcccggaccatttgataccagagaacactaacgatggatagccaacgcaatcttttagtcatcgctttgctgttcgtgtctttcatgatctggcaagcctgggagcaggataaaaacccgcaacctcaggcccaacagaccacgcagacaacgaccaccgcagcgggtagcgccgccgaccagggcgtaccggccagtggccaggggaaactgatcagcgttaagaccgacgtgcttgatctgaccatcaacacccgtggtggtgatgttgagcaagctctgctgcctgcttacccgaaagagctgaactctacccagccgttccagctgttggaaactagtccgcagtttatttatcaggcacagagcggtctgaccggtcgtgatggcccggataacccggctaacggcccgcgtccgctgtataacgttgaaaaagacgcttatgtgctggctgaaggtcaaaacgaactgcaggtgccgatgacgtataccgacgcggcaggcaacacgtttaccaaaacgtttgtcctgaaacgtggtgattacgctgtcaacgtcaactacaacgtgcagaacgctggcgagaaaccgctggaaatctccagctttggtcagttgaagcaatccatcactctgccaccgcatctcgataccggaagcagcaacttcgcactgcacaccttccgtggcgcggcgtactccacgcctgacgagaagtatgagaaatacaagttcgataccattgccgataacgaaaacctgaacatctctagcaaaggtggttgggtggcgatgctgcaacagtatttcgcgacggcgtggatcccgcataacgacggtaccaacaacttctataccgctaatctgggtaacggcatcgccgctatcggctataaatctcagccggtactggttcagcctggtcagactggcgcgatgaacagcaccctgtgggttggcccggaaatccaggacaaaatggcagctgttgctccgcacctggatctgaccgttgattacggttggttgtggttcatctctcagccgctgttcaaactgctgaaatggatccatagctttgtgggtaactggggcttctccattatcatcatcacctttatcgttcgtggcatcatgtacccgctgaccaaagcgcagtacacctccatggcgaagatgcgtatgttgcagccgaagattcaggcaatgcgtgagcgtctgggcgatgacaaacagcgtatcagccaggaaatgatggcgctgtacaaagctgagaaggttaacccgctgggcggctgcttcccgctgctgatccagatgccaatcttcctggcgttgtactacatgctgatgggttccgttgaactgcgtcaggcaccgtttgcactgtggatccacgacctgagcgcacaggacccgtactacatcctgccgatcctgatgggcgtaacgatgttcttcattcagaagatgagcccgaccacagtgaccgacccgatgcagcagaagatcatgacctttatgccggtcatcttcaccgtgttcttcctgtggttcccgagtggtctggtgctgtactatatcgtcagcaacctggtaaccattattcagcagcagctgatttaccgtggtctggaaaaacgtggcctgcatagccgcgagaagaaaaaatcctgattcggtgagttttcgctaaaataagggcggtcagttgaccgccttttttcttttcgtagggcggataagcaccgcgcatccgccacacaaagcaacaggaacatcatgagcgataatgacactatcgtagcccaggccacgcctccgggacgtggcggcgttggcatcctgcgcatctccggcttcaaagcccgtgaagttgccgaaaccgtgctgggtaaactgcctaagccgcgctacgccgattatcttccgtttaaagacgccgacggcagcgtgctcgatcaggggattgcgctatggttccctggcccgaacagcttcaccggcgaagatgtgctggaactgcaaggtcatggcggtccggtgatcctcgacctgctgttaaaacgcattctgaccattcccggcctgcggattgctcgccctggtgagttttccgaacgcgcgtttcttaacgataaacttgacttagcccaggccgaggcgattgccgatcttatcgacgccagtagcgaacaggcggcccgtagcgcacttaacagcctgcaaggcgcattctccgcacgggttaatcatctggtagaagccctcacccacttgcgcatttacgtcgaagcggcaattgatttccccgatgaagagatcgatttcctctccgacggaaaaattgaagcccagctcaatgacgttattgccgatcttgatgcagtgcgtgctgaagcacgtcagggtagtttgttgcgcgaagggatgaaagtggtgattgccggacgtcctaacgccggtaaaagcagcctgttaaacgcgctggcggggcgtgaagcggcaatcgtaaccgatatcgccggaactacgcgtgacgtgctgcgtgagcatatccacattgacggaatgccgctgcatatcatcgataccgccgggctacgtgaagccagtgacgaagtagaacgtattggtatcgagcgcgcgtggcaggaaattgaacaggccgaccgcgtgctgtttatggtcgatggcaccacaacagacgccgtggatccggcagagatctggccggaatttattgcccgtctgccagcgaaactgccgatcaccgtggtgcgcaataaagccgatatcaccggcgaaacgctgggaatgagtgaagtgaacggtcacgcgttaattcgtctcagcgcaaggactggtgaaggcgtggacgtgctgcgtaaccatctcaaacagagcatgggctttgacaccaacatggaaggcggcttcctggcgcgtcgtcgccacctacaggcgctggaacaggcagcggaacatctacaacagggcaaagcgcaactgttgggagcctgggcaggtgaactgctggcggaagagttgcgtctggcacagcagaacttaagcgaaatcaccggggaatttactagtgacgacctgctggggcggattttctccagcttctgtattggtaagtaaccgcgcttacgaggccgcattctgactgtcagatgcggcttcgcttcattgttaccactcctgttattcctcaaccctttttttaaacattaaaattcttacgtaatttataatctttaaaaaaagcatttaatattgctccccgaacgattgtgattcgattcacatttaaacaatttcagaatagacaaaaactctgagtgtaataatgtagcctcgtgtcttgcgaggataagtgcattatgaatatcttacatatatgtgtgaccagtaaatggttcaatattgacaacaaaattgtcgatcaccgcccttgatttgcccttctgtagccatcaccagagccaaaccgattagattcaatgtgatctatttgtttgctatatcttaattttgccttttgcaaaggtcatctctcgtttatttacttgttttagtaaatgatggtgcttgcatatatatctggcgaattaatcggtatagcagatgtaatattcacagggatcactgtaattaaaataaatgaaggattatgtaatggaaaactttaaacatctccctgaaccgttccgcattcgtgttattgagccagtaaaacgtaccactcgcgcttatcgtgaagaggcaattattaaatccggtatgaacccgttcctgctggatagcgaagatgtttttatcgatttactgaccgacagcggcaccggggcggtgacgcagagcatgcaggctgcgatgatgcgcggcgacgaagcctacagcggcagtcgtagctactatgcgttagccgagagtgtgaaaaatatctttggttatcaatacaccattccgactcaccagggccgtggcgcagagcaaatctatattccggtactgattaaaaaacgcgagcaggaaaaaggcctggatcgcagcaaaatggtggcgttctctaactatttctttgataccacgcagggccatagccagatcaacggctgtaccgtgcgtaacgtctatatcaaagaagccttcgatacgggcgtgcgttacgactttaaaggcaactttgaccttgagggattagaacgcggtattgaagaagttggtccgaataacgtgccgtatatcgttgcaaccatcaccagtaactctgcaggtggtcagccggttagtctggcaaacttaaaagcgatgtacagcatcgcgaagaaatacgatattccggtggtaatggactccgcgcgctttgctgaaaacgcctatttcatcaagcagcgtgaagcagaatacaaagactggaccatcgagcagatcacccgcgaaacctacaaatatgccgatatgctggcgatgtccgccaagaaagatgcgatggtgccgatgggcggcctgctgtgcatgaaagacgacagcttctttgatgtgtacaccgagtgcagaaccctttgcgtggtgcaggaaggcttcccgacatatggcggcctggaaggcggcgcgatggagcgtctggcggtaggtctgtatgacggcatgaatctcgactggctggcttatcgtatcgcgcaggtacagtatctggtcgatggtctggaagagattggcgttgtctgccagcaggcgggcggtcacgcggcattcgttgatgccggtaaactgttgccgcatatcccggcagaccagttcccggcacaggcgctggcctgcgagctgtataaagtcgccggtatccgtgcggtagaaattggctctttcctgttaggccgcgatccgaaaaccggtaaacaactgccatgcccggctgaactgctgcgtttaaccattccgcgcgcaacatatactcaaacacatatggacttcattattgaagcctttaaacatgtgaaagagaacgcggcgaatattaaaggattaacctttacgtacgaaccgaaagtattgcgtcacttcaccgcaaaacttaaagaagtttaattaatactacagagtggctataaggatgttagccactctcttaccctacatcctcaataacaaaaatagccttcctctaaaggtggcatcatgactgatcaagctgaaaaaaagcactctgcattttggggtgttatggttatagcaggtacagtaattggtggaggtatgtttgctttacctgttgatcttgccggtgcctggtttttctggggtgcctttatccttatcattgcctggtttagtatgcttcattccgggttattgttattagaagcaaatttaaattatcccgtcggctccagttttaacaccatcaccaaagatttaatcggtaacacctggaacattatcagcggtattaccgttgccttcgttctctatatcctcacttatgcctatatctctgctaatggtgcgatcattagtgaaacgataagtatgaatttgggttatcacgctaatccacgtattgtcgggatctgcacagccattttcgttgccagcgtattgtggttaagtagcttagccgccagtcgtattaccagtttgttcctcgggctgaagattatctcctttgtgatcgtgtttggttcttttttcttccaggtcgattactccattctgcgcgacgccaccagctccactgcgggaacgtcttacttcccgtatatctttatggctttgccggtgtgtctggcgagttttggtttccacggcaatattcccagcctgattatttgctatggaaaacgcaaagataagttaatcaaaagcgtggtatttggtagcctgctggcgctggtgatttatctcttctggctctattgcaccatggggaatattccgcgagaaagctttaaggcgattatctccagtggcggcaacgttgatagcctggtgaaaagcttcctcggcaccaaacagcacggcattatcgagttttgcctgctggtgttctctaacttagctgttgccagtagcttctttggtgtcacgctggggttgttcgattatctggcggacctgtttaagattgataactcccacggcgggcgtttcaaaaccgtgctgttaaccttcctgccacctgcgttgttgtatctgatcttcccgaacggctttatttacgggatcggcggtgccgggctgtgcgccaccatctgggcggtcattattcccgcagtgcttgcaatcaaagctcgcaagaagtttcccaatcagatgttcacggtctggggcggcaatcttattccggcgattgtcattctctttggtataaccgtgattttgtgctggttcggcaacgtctttaacgtgttacctaaatttggctaaatccttcaagaagccagccattcgctggcttcttgcctctcaggaaatcacttatgtccaaatggcaactcgcctgatcctccttcaccacgtatgctttgcgtcaccttactatcaggacgctttagcccatgtcccgctttttgatttgtagttttgccctggttttactttatcccgccgggattgatatgtacctcgttggtttaccgcgcatcgccgccgatctcaatgccagcgaagcgcagttgcatattgcgttctccgtatatctggcggggatggcagctgcgatgttatttgccggtaaagtggccgatcgtagtgggagaaagccggtcgccatacccggcgcggcgctatttattattgccagcgtgttctgtagtctggctgaaaccagcacgttatttcttgcaggccgatttctacaggggttgggcgcaggctgttgttacgtagtggcgttcgctattttgcgcgacacgctggatgatcgacgtcgggctaaagtgctgagtttactcaacggtattacctgcatcattccggtgttagcgccagtgctcggacatctgattatgcttaaattcccgtggcagagtctgttctgggcgatggcaatgatgggcatcgcggtactgatgttgtctttgtttattttaaaagaaacgcgcccagcggcccccgcagctagcgataaaccacgagaaaatagcgagagcctgcttaaccgttttttcctcagccgtgttgttatcaccaccctcagcgttagcgtgatcctcactttcgtcaacacgagtccggtattgctgatggaaatcatggggtttgagcgcggtgaatacgccaccattatggcgctgaccgctggcgtcagcatgaccgttagtttctccacgccatttgcgctgggaatttttaagccacgtacgttgatgatcaccagccaggtgttattcctggcggcggggatcactcttgccgttagtccttcccatgcggtttctctgtttggtatcacgctgatttgcgccggtttcagcgtaggttttggtgtggcgatgagtcaggcgttagggccgtttagtttacgcgcgggcgtagccagcagcaccttaggtattgcgcaggtttgcggtagcagtctgtggatttggctggcagcggtggttggtatcggcgcatggaatatgctgatcgggattctgattgcctgtagcatagtgagcctgttgctgattatgttcgtcgcgcctggacgccccgttgccgctcatgaagaaatccatcaccacgcttgatctcaatctgctgctttgtctgcaactgctgatgcaggagcgcagcgtaaccaaagcggcgaagcggataaacgtgacacctagcgcggtgagtaagagcctggcaaagttaagagcgtggtttgacgacccgctctttgtgaacagtccgctgggtctgagccccacaccgctgatggtcagcatggagcaaaatctggcggagtggatgcaaatgagcaacctgctgctggataaaccgcaccaccagacaccgcgcggcctgaagtttgagctggcggcggaaagtccgctgatgatgatcatgcttaatgcgctgagcaaacagatctaccaacgttacccgcaggcgaccatcaaattacgtaactgggattacgattccttagatgccattactcgtggtgaagtggatatcggtttttccggtcgcgaaagccatcctcgcagccgggagctgttaagcagcctaccgttagccattgattatgaagtgctgtttagtgatgtgccctgcgtctggttacgcaaagatcatccggcactgcatcaaacgtggaatctggacaccttcttacgttatccgcatatcagcatttgctgggaacagagcgatacctgggcgctggacaatgtgttacaggagctgggacgcgaacgcacgattgctatgagcctgccggaattcgagcagagtctgtttatggcagcgcaacccgacaatctgctactggcgaccgcgccgcgctactgtcagtactacaatcaactccatcaactgccgttggttgctcttcctctcccgtttgacgaaagccagcaaaaaaagctggaagttccttttaccctgctgtggcataaacggaacagccataatccgaagatcgtctggttacgggaaaccattaaaaacctttacgcgagcatggcataaccgaatcgtatgaaacgcgacccaatttcacaataaaatgtaaaaaagttgtaataagcttgtctgaatcgaacttttagccgctttagtctgtccatcattccagtaaatgattactcttgtattcataatggaccattaagcatggagcgaaaaatggcgactcactttgcccgagggattttaacggaaggacatctgatttctgttcgtctcccctcccagtgtcatcaagaagcccgaaacattccccctcatcgtcaaagccgttttctggcgtccagaggtttactcgcagaactgatgttcatgctgtatggcattggcgaattgccggaaatcgtcaccctgccgaaaggtaaaccggttttcagtgataaaaatttgcctagcttttccatttcctatgccgggaatatggttggcgtggcgttaacaaccgaaggtgaatgtggcctcgatatggaactacagcgtgcgacgcgcgggtttcatagcccacacgcgcccgataaccacaccttttccagcaatgaaagcctatggatcagtaaacaaaacgatcctaacgaagcgcgggcgcagctcatcacgctgcgccgaagcgtgctaaaactaaccggtgatgttttgaatgacgatccgcgcgatctgcagctgctgcccattgccggacgcctgaaatgtgctcatgtaaatcatgtagaagcgttatgcgacgcggaagacgtgctggtgtggtccgtggcggtcacgcccacgattgaaaagctcagtgtctgggagttagatggcaaacacggctggaaaagcctgccggatattcacagccgcgccaacaatcctaccagccggatgatgcgttttgcccaactctctaccgtgaaggcttttagcccaaattgatagacaaccacaggagtcatcatgtctgaaaaattgcaggtggttacgttactggggagcctgcgcaaaggcagttttaatggcatggttgcacgtaccctgccgaaaattgctccggcgagcatggaagtcaatgcgttaccatccattgccgacattcccttgtatgacgctgacgtacagcaggaagaaggttttccagcaacggttgaagctctggcggaacagatccgtcaggctgacggtgtggtgatcgtcacgccggaatataactacagcgtaccgggtgggctgaaaaatgccatcgactggctttcccgcctgccggatcaaccgctggccggtaaaccggtattgattcagaccagcagtatgggcgtgattggcggcgcgcgctgtcagtatcacctgcgccagattctggttttcctcgatgcaatggtgatgaacaagccggaatttatgggcggcgtgattcagaacaaagttgatccgcaaaccggagaagtgattgatcagggtacgctggaccacctgaccgggcaattgaccgcatttggtgagtttattcagcgagttaagatctaaataaaaaacccgccagcaatcatgcatggcgggtttttaacgcgctatcgattttagtgagcgtcgataaagacaatcttcaggataaacagcagcgcaacgatgattacgcacgggcttagatcacgcagacgtccggtaccgattttcatcacgcagtaggagataaagcccagcgcgataccttcggtaatgctgaagctgaacggcatcatcacggcggtaataaacgccggaacagattcagtaagatcctgccagttcacgcgtgccagactggaagtcatcagcacgccaacgtaaatcagcgcaccagctgcagcgtagcctggcaccatccccgccagcgggctcagaaagataaccagcaggaacagcagaccaacaaccactgccgtcagaccggtacgaccgccaacgcttacgccggaagaggactcaatataagccgtaacggaagaagtaccgataaagctaccggtcacggaagagatactgtcgacatacagcgcctgcttcatgcgcgggaatttccccttctcatccgccagacctgctttatcggtcacgccaatcagcgtaccggaggagtcaaacaagttgaccaacatgaaagagaaaatcacccctgccagcccgaggttaaagctcccggctaaatctacatgacccacaactgtcattacgctcggcggcgcagaaacgatgccattgtagtgcacatcacccagcatccagcccagcagcgtcgtcaccacgatagaaaccagcaccgctgcgtgaatgttgcggctggccagaatagcaatgatgaagaagccgaggatacccagaagtacgctgtgagaagtcagattaccgatgctcaccagcgtttccgggttagcgacaatcacacctgcgtttttcagccccatcatgccaatgaacagaccgataccgctggtaatacccacacgcagactcaccggaatgttggctatcatccagtagcgaacgcggaaaatcgtcagtaacagcagacctatcgcgccccagaagattgcgcccatcccgacctgccacggcaagcccatcgcctgtacaacgacaaaagcgaagaacgcattcaggcccatagcgggtgccagtgcaactggcaggttagcaaacagtcccatcataatactgccgaatgcagcgatcagacaggtagtgacgaagacggcgctggtatccatgccagcaacgccaagaatttgcgggttaacaaaaacgatgtaaaccatcgtcaggaaggtggtaaaaccggcgatcacttcggtccgtgccgtcgtgccatgttcgcgcagtttaaacacgcgttccagcatcccctgaccagaagtctgggtggtatgttgatgactcattatctatttccgaacaaggagggaaaatccgtcgctatcgtataccaaaatgcgacaataggcgcgtttgtgagagacttttttattggatttacttatacggcaacgattgcgttgcgcaaatcggctctacgaaaacgttaaactgattaaaaaggaaaggcatgtcccggatagaagcggtatttttcgactgcgacggtacgctggtcgacagtgaagtcatttgctctcgcgcatatgtaacgatgtttcaggaatttggtattacgctcgatcctgaagaggtattcaaacgtttcaaaggtgtaaaactgtacgaaattatcgatattgtttcccttgaacatggtgttacgttagcgaaaacagaagctgaacacgtttaccgtgcagaagtcgctcggctgttcgatagtgaactggaagccatcgaaggggctggagcgctcctgagtgcgatcactgcgccaatgtgtgtggtatctaacggcccaaataacaaaatgcagcattctatgggcaagctgaatatgttgcactacttcccggataaactgttcagcggctacgatattcagcgctggaagccagacccggcgttaatgttccatgcggcaaaagcgatgaatgtaaatgtagaaaactgcattctggttgatgacagtgttgccggtgcacaatctggtatcgacgcaggtatggaagtgttctacttctgcgccgacccgcacaataagccgatcgttcacccgaaagtcaccacctttacccatcttagccagttacctgaactgtggaaagcgcgtggttgggatattacggcataattcttcacactcccttcacttaccccgcttaaattggcgctcaaaggtaagtaaagggagtttgatatgtctgttagtcgtcgggtaatacatcacggactttattttgcagttttaggaccgttaattggtgttctgtttcttgtcctctacatattcttcgcaaaagaaccgctggttctttgggtgataatacatccaatttttctcttattgagcataactacgggagctattcctgcgttgttaaccggtgtaatggttgcctgtctgccggaaaagatcgggagtcagaaacgttatcgttgtctggctggtggcataggtggcgtcgttatcaccgagatctattgtgcagttattgtacatattaagggcatggcttccagcgagttgtttgaaaacattctttctggtgacagtctcgttgtccgcatcattcctgcattgctggcaggtgtggtgatgagcagaatcattacccgtctacccggattggatattagttgtcctgaaacagactctttaagttaagcgggatactttatctttgggctactcaaaagcagacaggatgtttctatgactcaaaatatcaggccgttaccccaattcaaatatcatcccaagccactggaaacaggcgcatttgaacaggataaaaccgtagagtgcgattgctgtgaacaacagacgagtgtttattacagcggtcccttttattgcgttgatgaagttgaacatctctgtccgtggtgtattgcggacggttctgctgctgaaaagtttgcaggtagttttcaggatgatgccagcatagaaggtgttgaatttgagtatgatgaagaggacgaatttgccggtattaagaacacatatcctgatgaaatgctgaaagagttggttgaacgcacgccaggttatcatggatggcagcaggaattctggctcgcgcattgtggcgatttctgtgtttttatcggctatgtgggctggaatgatataaaagatcgcctcgatgaatttgccaaccttgaagaagattgtgagaatttcggtattagaaattctgatctagctaaatgcctgcaaaagggtggtcattgtcagggttatctcttccgctgtctccactgcggcaagctgagactgtggggtgattttagctaattatttaaataatgagaacaggccggagcgtaattcacacatccggccttatttcttaagcttaaccgagtgctaattctgcggcagcggctttatcagcgattaccatcaggctaggatgcagctgcaacacggaagctggaacatcttcggtaaccggaccttgcagaacatttttcagtgcctgcgctttacccgcgccgctgacaattatcagcaagtttttcgccgccatgatgcttttcggccccatcgtcacgtagctgtcaggcactaagctaaagtcgccgcccaactcgccatgcgccacaatatcaaccatctctccctggatcgggaactccacggtttgctcatggaaatgggtcgtattcggcaaattgccacaaaaatgaccatctgcacctaatcccagcaccaccaaatccagtccgccttcacgcgccagtttctgatcatgctcgcggtagttatcaatagtgagcttctggatattctcttctttgatccccgcaggggtgaaaaacagattacgcagattggtaatcgttacgccttctccctctttgccgcgaaatggaatttcatcaaaattatagaaatagcagttatcgtaccagggcttacctttaaccagggtggtgaggtattcatacatgcctttgggcgtgctaccggcggtaattgccaggttaacacgacgcgtcttgctcatataaccaagcagatggtgtgccgcgacacggctcatttcctggtaatcttcggtaatgattaatttcatcttaatgccttattttatttaaataatttctgtacaaaggctgcataggctggtcgccagacatccatttcatggttcagacccggatattcctggtaatcaaagttaatttttttctgctcaagctcagttttcagcccggcgatatccttgccggttacgacatctttatcccccacaaccacagtaaaattacgtagttgctggttgatagctgccggatcgttcagtcgggccgcgacaccttcatccggtacggttgtcgtggtaacaccactgaatgtggccagccagccaaagctttccagatgattcattccggaaaccagcgcctggtacccgccttgactaagccctgccagcgcgcggccatcggcatctttacggacattaaaacgcttgctaatcagcgggataatatcgttcatcagttcgcgatctgccgctttagcattcagcggataaaagactttacgtctttcctgaggcacgaaatcttcgggaataatgcccttcgcatcggtttctgtatccgggatcaccaccagcatcggtttaattttcccttcagcaagcaggttatccatgatttgcgggatacgcccctgatcgatagcggaacgtccggtatcaccaaagccgtgatagaaatagagcactggcaaaggctcgcccatgccggtgtatcctggcggggtccagacatacatctgacgttcagattgcaatgcgttggagtggtaagttatggcgatcaaatcaccatgcgcaacagaacgcgtatccagataactgcctggcaccagaatcatactggagttaacctggcgctgaggattagtcattgcggtgcctgtatcaatgctgcgtacaccatcaacattgaaaaaatactcgtacaggttgcctttcaggataggtgtgcgccagctccagactcctgcttcgtctttggtcatcgggtgaatattgtccggaaccggaacacccaccactacagagacattttttgccccaggggcaaagtagcgaaaggtcacgctgttatcggcattgacctgagtcacatactgtttcaccgggatagtgggtgccgggctggctggcatatccgctgctatggcccactgagcagaaataccgctggcaatagccagcgttaaagcagcaatttttatattcatcgtaatattcctttcattaagttccattaccaccagatttcagcctgggcaccgacagcaaactggtcgtctttattgtcttcaaaggtgaagccatccagttcgttttccagggctttgatatacgtggcgtagaaacgaatttccggacggctggtcaacatactggtattgactttaaaggtatggaagagcgtggttttataaccagactcattaaatttattactattcgcatctttgttttgctgggtgaaatagcccagttcaacacctgtctggttatattggtcccaaatataggccgggcgaacaaccgcacgaatagattcgaaatcagagtgggcgcctgtttcgtagctatatatatcgttaccgaaggagtaaacaatcgcgttagctacaatgaaatgatcgccaatataggcttcgccctggctagtcagacgtaccgctgttccgccggtgtgatcaccataataacgaccattaaaggtggtaaatggacttgcgccagcataacggccaaagttactggcgatagagttattcgcgaccaggaaggagaattcgttgaagccacctttatcaaatttctgcgttaaagatgtgccaaacatccaggtatctttccagtcataatacccgttattatcctgattatctttttcgcttgcgctttcgtttgccgtgacataacgaccacttaccattaaggtggctttatcccataacgggatatctttatagcgtaaatcaatggtattggtattaatctgctgtttgttttgcaggctgcgatcgtaatcatcgacatcttcgcgaaccagcgcgatatcaattttacccggaccgactttccagttttccagacctacacccgctgcggcatcagtacgctgcgttttccagtcaagcatctggatttcaattttcggcgcaccgtgtttacccacccagaaatcagcctctggcgcaaagggcaggaaacctttggtggtaacgtacatatcggagaactgcatatagttctcgccaccggcgttatcgccaaaccagccggtagagtactgctgaccaacgttaccatccatcatcacaacggcatcaacccgtttgccgttttcgttgtagacacgttgttttaactgcaaatcaaaccagccggagtattcgttaccaaagcggcccagagaaccaatcgcccaacttttaggactaccatgagaggcggtcccccaaccagaacggtaatagccgttgtaactaaagccaatttcatctttcacaaatttactgaaatctttcagagtcatggaagaataaatgctgcctgtctcactggcatttttctcttcatttttgaccagtacagcatcaggttttgcggcactactggtcgggaacggattggcggcatacccttgatcattcgtacttacgctacgattcaccgtcgctggcgtatactttttcttctcttcatctttatactttttgagttcgctttgcgtttctcttaacgccttttctaataactcaaggcgttgttccaccgttaaactttcagccaaactttgtgcagaaaaggctaacggtgccattaataagatggcagaggtaataagatttcgtctaaacataatatccctttatggtgcaaagaaagaattaacgcatcgcatccagactgttctgaatgcgacgataattaaggtgctttaatggttattttttttaaactcagcccccgcgtcttgatcacctctgcataccatccgaagcttttcttgcgtgttcttgtgaggcttccttcgccattatcatcacgatccacataaataaagccgtagcgcttagacatttgactatgagatgcactgactaaatcaattggcccccaactggtgtaccccataatatccacaccatcggcaatcgcttcatttacctgtaccaggtgatcgtttaaataggcaattcgataatcgtcctgtatgctaccatccgcttcaacgctgtcttttgcgcctaatccgttctcgacaataaataacggtttttgataacgatcccaaagcgtatttaacagaacccgtaatccaaccggatcaatttgccacccccactcactacttttcagatgcggattggggatcatattcagtatgttgccctgcgcatttttattaatgctttcgtcgtgggaaacacaaccagtcatgtaataactaaaagagatgaaatcgacggtatgttttaaatcttctgcgtcactttcagtcatctcaatggtgatattgtggtcgcggaagaaacgctgcatatagccgggatactggccacgcgcctgaacatcaccaaagaacatccagcgccggttctcttccatggcctgcaacatatcctgtggctggcaggtgagggggtaaaccagcccaccgagaagcatattgccgattttcgcttcggggagcaggctatgacaggctttaactgcccgcgcactggcaaccagttgatggtggatagcctgataaacttccgcctcgccactctcttctgccagccccacgcccgtgaatggcgcgtgtaagctcatgttgatttcattaaacgtcagccataacgccactttatgttggtagcgagtaaagaccgtgcgggcgtaatgctcgaagtgatcgatgaccgctcgattagcccaaccgccgtagtttttcaccagcccatatggcatttcgtaatgggataacgttaccagcggcttgatccccgcctgcgccatttcatcaaacagccgatcgtaaaacgctaaccccgcttcattcggttcgacttcgtcgccctgagggaaaattcgcgcccaggcaatggaaatacgcagacaggtgaagcccatctcggcaaataacgcgatatcttccgggtaacggtgataaaaatcgatggcgacatctttgatattctctttccccaggatgcgcggttccatttttcccattacgccatgaggctgtaaatcactggtgctgatccctttgccatcttcctgccaggcaccttccacctgattggcagctgttgcgccaccccaaagaaatgtttctggaaatgctttcataattaactccttttatcgttagcgaatgatggataacagcggttcacctgcgcttatctgcgccgtgccgtggggtaatacgtccgtaaaatcatcgctattactgattaataccggcgtcgtcagatcaaatccggcctcgcgaatagcagggatatcaaaagaaatcagccgatcgcctgtattgaccttgtcacccacgttgacgtgagcggaaaagaatttgccgtccagttttacggtgtcgataccgacatgaatcaggatctccacaccatcatcactctcaatgccaatggcgtgtaatgtggcgaacaagctagcaattcgacccgcaaccggagaacgcacttcaccaacgctgggcagaatggcaatacctttacccaacaggccactggcaaacgtggtatcagcgacgtgaatgagcggcacaatctctcccgtcatcggactacagataccgccctgctcaggtggtgtaataacctctggtgttttctcttgcggggcaccctgcgctggctgacgtttagcggtgatgaaatgaagcatcaccgtaccgacaaatgcgcaaccgatggcaatgacaccgccaataacgctggcccagacggtgaaatcaattcccgtactcgggatggtttgcatgaaggtgaaaatacttggcaaaccaaaggagtagactttcgtttgcgcgtagccaataatggtggccccccaaagccccactgatacaggcgataacaaaggggtacttacgcggcaggttgacgccatataccgctggttcggtgataccaaacagactcgtcaacgccgcacttcccgccaccacttttttctgcgcatcgcgttcgcagaggaagacgccgagcgccgccccgacctgcgccataatggcgggcattaacagcgggatcatggtgtcgtagcccagcacggtgaagttattgatacacagcggcaccaggccccagtgcagtccgaacatgacgaagatttgccagaagccgcccattaccgcgcccgcaaatgcaggaaccgcctgataaagccagagataaccggcggcaatcagttcgcttatccaggtacttagcggccccaccagcagaaaggtgacgggtgtgataaccatcagacatagcaatggtgtgaagaaatttttgattgcgctcggtaaccacgcattaagtcggcgttccagaatgctgcacaaccaggcagaaaaaataatgggaataacgctactgctgtaattcaacaatgtgaccggaatacccaggaaatccagccccagcgcatccgctttttgcccgttctcgaaagcagtcagaattaatggatgcactaacgctccaccaatcaccatggcagtaaatggattaccgccgaagcgtttccccgcggtgtatcccaggattatcgggaagaaccaaaacaaggcatcactggcgctgaataaaattaaataagtaccactttgttcggtcgtccactgaaaagtgagcgccagagccagcatacctttcaagatcccggttgccgccatcaaaccgatcagaggcgtaaaaataccactaataacataaacaaagcggtttagcagattacctttatcatcattttccggtgcctgttgcgctttttcgtcaaggcctgccacactgttaaccgccaggaagacatcggccacatggttacctatgaccacctgaaactggccaccgctttccaccaccataataataccgggggtctttttcagtacctctgcttgcgctttgctttcatcctttaatttaaaacgtaatcgcgttgcgcaatgcatcagactcacaatgttatctgcgcccccgactcctgcgactatttttctggctaactccgtcataacttgccctctaccgctttgcggcaaaactccaaaaaaaaacctgaaaaaaacggcctgacgtgaatcaagcaatttttttcaggttttgcccgcttagtgcggtaacaatcctttactcagtaataatatttcagtgttctttgcgcacgcgctctatatttatggctaaaaacataatctctgcgggactaattttacgttgatactgcaaaccaataaaaatggcgatccgttccgcacattgccatgcttgcgggtaattttgttttactgcttgttgtaaactttcatcactatcgttaatactagcatgttcaagaatacgccaggataaaaacttcagatgtgtaaccagtcgctgataactcaagctttcttcctggtaattaaggctgaactgaaattttattaattgcagcatttcgcgcattaactgcgtgacacctgcaacatcctccatatttccgctcatttgggcactgaccagatgcatggcaataaagcccacttcatctttcggtaactgcacgcccaaccgtttatcaataatggttaacgcttcttcccctagctggaactctttcgggtaaagccgctggatatcccacagcaacgggttgggcagcaacacgttttgctgaaagcgtttaatcgcaaactggcaatggtcagttaggctgatataaatactgtcctgtaattttcccaagcgctcctgcgctaaagagataatacgatcacaggttgccatcacctcaagaggaatatgacttaagagttcgcttaatcgcccgttcagttcatgactgctcaaggcatactctttttctattccactactgttaattctttcgccagcgcgtttttgaaagccaattccgcgccccatgacgactttttcccgctgttgatcatcaataaccaccacaacattattgttgagaattttggtgatttgcatgttcatagcaaggaccttttttataaacaaaaaaacccgacttcaccagtattctctggttatgtcaggttttgcctgcgaatgcagtaacaatccagtcatttattaatggtttttataacgaacatccaggttcggaaattaatttaattgcgtgcagagaaaatagcaatgcgctattgataaaaatatgaccatgctcgcagttattaactttgtgtaattttaggaatttataaagttatatataacaaatcccaataattaagttattgggatttgtctggtgaattatttgtcgctatctttccccgccagcagtttatccagctcatcgccaccgacgtgacggaaatcctgccccttcacgtagtagaagataaactcacaaatattctggcagcggtcgccaatacgttcgatagaacgcgcgcagaacagcgcagtaagtacgctcggaatggtacggctatcttccatcatgtaggtcatcagttgacgaacaataccttcgtattcctgatcgacttttttatcttcacgataaatacgtaccgcttcgtcaatgtccatccgcgcgaacgcgtccagcacgtcgtgcagcatctggatggtatgacggcccaggctctccagacttaccagcaacggctgatgctgctgggagaatttctccagcgcagtacggcagattttgtccgccacgtcgccaatacgctccagctcggcaatggttttactgatcaccataaccagtcgcaggtcgctcgccgtcggctgacgtttggcgataatgcgcacgcaggcttcatcgatcgccacttccatcatgttgacgttcttgtcgccttcgatgacgcgcttcgccagatcgctgtcctggttatgcatcgcggtgattgcatcagaaagctgctgctccaccatgccgcccatggtcatcacctgcgtgcggatactttccagttcggcgttgaactggccggaaatatgtttattaagattgagactgtccataacgcactcctgaatcaaccgtaacgaccggtgatgtagtcttctgtttgtttcttcgctggcttggtgaacagatcgtccgtgttgctgaactcaatcaattcgcccaggtacataaacgccgtgtggtcggaacaacgcgcagcctgctgcatgttgtgggtgacgatcaccacggtgtaatcctgcttcagttcggtgatcagctcttcaatacgcccggtagagatagggtcgagcgcgctacacggttcgtcgagcagcagcacttccgggcgaatggcgataccacgcgcaatacacagacgctgttgctgaccaccagagagagagtaaccgctctggtgcaatttatctttggtttcgttccacaatgcggctttggtcaatgcccactgcacgcgctcgtccatgtcggcacgggagagcttctcaaacagacgaacgccaaaagcgatgttgtcgtagatggacatcggaaacggcgtcggtttctggaacaccatgcccactttcgcacgcagcagtgcgatatcctgagagttggtcaggatgttgtcgccatcaagcagaatttcaccttccgcacgctgctccgggtacagttcaaacattttgttgaaggtacgcagcagcgtgcttttaccgcagccggacggcccgataaacgccgttacctggtttttagcgatatccaggttgatgtttttcagggcatggaatttgccgtagtagaagttcaaattacgaacctgaattttactcggggcagtttcaaccatactcattgcaatcttttcctcatcgtgcctgatgcacttcgctaatcaggcttaccgtaggccggatcaggcgttcacgccgcatccggcaaagtgttaaccgtgtacagagtcaaaaaggcgctcggtcggtcccctcgcccctctggggagagggttagggtgaggggaaaaccgtgtcagcaatatcaaccgtgtttattcttcgcaaaaacaacgcgcgccagaatgttcagcagcagtacgcacagggtaatgatcaataccccggcccaggccaattgctgccattccgcaaacgggctcatcgcaaacttaaagatcgtcaccggcaggttggcgatcggctgcatcatgtccgtgctccagaactggttggagagcgcggtaaacagcagcggcgcggtttcaccagcaatacgggcaatcgccagcaggataccggtcataatcccggacacgctcgctttcagcgtaatcgcagagatcatcttccacttcggtgtacccagcgcataagccgcttcacgcaggctgtacggcaccagtttcagcatgttctcggtggtgcggataacaatcggcacctgcaacaacgccagggcaatcacgcccgcccagccggagaagtgctccatctgcgccaccacaatggtgtaaacaaacagaccaaccacaatgctcggcgcagagagcagaatgtcgttaatgaagcgaatcacttctgccagccaggatttacgaccatattccgccagataaatccccgccataatgcccagcggcgtaccgaataccgtggcccacaaaattaacagcccgctacccgccagagcgttcgccagaccaccaccttccgtattgggcggcggcgtcatttcagtgaacagcgccaggctcataccgtcgataccgcgagtgatggtggacattaaaatccagatcagccagaacaggccgaaggccatcgtcgccatgctgagcgtcagcgcaatacggtttttgaggcggcgacgcgcctgcattttgcggcgagattcagccagcgccgcagtggtttgcatttcaaccatagccattagcgtgccccctcattcttagccaggcgcataatcataaacttgcttgcggcgaggacgatgaaggtaatcacaaacaggatcaggcccagttccatcagtgcggcaacgtgcagaccggattccgcttccgcaaattcgttcgccagcgcagaggtgatactgttgcccggcatatacaggctggcgctgtcgagctggtaggtgttaccgatgataaaggtcaccgccatggtttcaccgagcgcgcggcccagccccagcatgatgccgccgataacaccatttttggtgaacggaagaacgatacgccagataacttcccaggtggtgcagccaataccgtaggcgctctctttcatcatcaccggggtttgttcgaacacatcacgcattaccgccgcaatgtacggaataatcatgatggcgaggatcacgcctgccgcgaggataccgataccaaatgcggggccagagaacagcgcgccaacaatcgggatattgctcatgatattgccgaccggctcctgaaagtaaacggcgaacagcggcgcaaagataaacaggccccacatgccgtaaacgatacttggaatggctgccagcagctcaatggcgatacccagcgggcgtttcagccagccaggcgcaagctcagtcaggaacagggcgataccgaaactcaccgggacggcgatcagcagcgcgataaagctagtcaccaacgtaccgtagatcggcaccagcgccccgtagatatcgttcggtgcatcccactctttggtccataggaaagccagaccaaatttctgaatgctcggccaggaggagatgatcagagagacaataatgccacccaacatcaatagcacaatcagcgccgccagttttaccagcacgctgaaaattatgtcgccctttttacccggtgggttaaaagcaggcttggttgcagccataagttactcttcagttaaacgcgtttacaaagtcattttgtaatgccggatgcggcgtaaaacaccgtacccggcctggagttttattagtacagcggcttaccgctactgtctttaatattggtcttccacgcagcgcgaacctgttcaactacactatccggcaggctggcgtaatccaggtcgttcgcctgtttagccccggttttgtacgcccagtcgaagaatttcagcacttctgtgccttgttctggtttcttctgatctttgtggatcagaatgaacgtggtagaggtaataggccatgcatcttcgcctttctggttggtcagatcctgagcgaaggttttgctccagtctgcaccttttgctgcattagcgaagttttcttcggtcggactaaccggtttaccatcagcggagatcagtttggtgtacgccaggttgttctgcttcgcgtaagcatattcaacataaccaattgcacccggcagacgctgaacgaacgcggcgataccgtcgttacctttaccgcccagaccgatcggccattttacggtagagccagtaccaacgttgtttttccactcttcgttcactttcgccaggtagctggtgaagacgaaggaagtcccggagccatctgcgcggcgtactacagcaatgttttgactaggcagtttcagacccggattcagtttggcgatggcttcatcatcccacttcttgattttgcccaggtagatgtcgccgagggttttaccatccagcaccagttcgccagacttcagccctggaatgttaaccgccagcaccacgccgccaatcacggtcgggaactggaacagaccttcctgagccagtttttcgtcagacagcggcgcgtcagaggcaccaaaatcaacggtattagcgataatctgttttacgccaccggaagaaccgataccctggtagttaactttattaccggtttctttctggtaagtgtcagcccatttggcatacaccggcgcagggaaggttgcacctgcacctgtcaggcttgcttctgcaaacacagagaaagcactcatgcttaaggtcgcggcgacaacagttgcgacggtggtacgcataactttcataatgtctcctgggaggattcataaagcattgtttgttggctacgagaagcaaaataggacaaacaggtgacagttatatgtaaggaatatgacagttttatgacagagagataaagtcttcagtctgatttaaataagcgttgatattcagtcaattacaaacattaataacgaagagatgacagaaaaattttcattctgtgacagagaaaaagtagccgaagatgacggtttgtcacatggagttggcaggatgtttgattaaaaacataacaggaagaaaaatgccccgcttacgcagggcatccatttattactcaaccgtaacgctttttgccaggttacgcggctggtcaacgtcggtgcctttgatcagcgcgacatggtaagccagcagctgcagcggaacggtgtagaagatcggtgcaatcacctcttccacatgcggcatctcgatgatgtgcatgttatcgctacttacaaaacccgcatcctgatcggcgaagacatacaactgaccgccacgcgcgcgaacttcttcaatgttggatttcagtttttccagcaattcgttgttcggtgcaacaacaataaccggcatatcggcatcaattagcgccagcggaccgtgtttcagttcgccagcagcgtaggcttcagcgtgaatgtaagagatctctttcaacttcaatgcgccttccagcgcgattgggtactgatcgccacggcccaggaacagcgcgtgatgtttgtcagagaaatcttctgccagcgcttcaatgcgtttgtcctgagacagcatctgctcaatacggctcggcagcgcctgcagaccatgcacgatgtcatgttcaatggaggcatccagacctttcaggcgagacagcttcgccaccagcatcaacagcacagttaactgagtggtgaatgctttagtggatgccacgccgatttctgtacccgcgttggtcattagcgccagatcggattcgcgcaccagagaagaacccggaacgttacagattgccagactaccaaggtaacccagctctttgctcagacgcaggccagccagggtatccgcggtttcgccagactgactcaaggtgatcatcaggctgttacgacgcacggcagatttgcgatagcggaattcagaggcgatttcgacgtcgcacggaatacctgctaggctttcaaaccagtagcgggaaaccataccggagttataagaagtaccacaggcgaggatctgaatatgctcaaccttgctcagcagttcgtcggcgttcggtcccagctcgcttaaatcaacctgaccgtggctgatgcgtccggtaagggtgtttttgatcgcgttcggctgttcgtagatctctttctgcatgtagtgacggtaaatgcctttatcgcccgcgtcatattgcagattggattcgatatcctgacgttttacttccgcgccagttttatcgaagatgtttacgctacggcgagtgatttccgcaatatcgccctcttcaaggaagataaagcgacgggtcaccggcaacagcgccagctggtcagaagcgataaagttttcgcccatccccaggccaatcaccagcggactaccagaacgtgccgccagcagggtatccgggtgacgggagtccatgatcactgtaccgtacgcaccacgcagctgcgggatagcacgcagaacggcctcacgcagagtcccgccttgtttcagctcccagttcaccagatgggcaatcacttcggtgtcggtttcagaaacgaaggtatagccacgcgcttttagctcttcacgcagcggttcatggttttcgatgatgccgttatgcaccaccacaatgtgttcagaaacatgcggatgcgcattcacttcactaggttcaccgtgggtcgcccagcgagtgtgagcaataccagtgccgccatgcagaggatgttcttccgctgcctgtgccagcatctggactttaccgaggcgacgcaggcgggtcatatgaccttctgcatcaacaacggccagaccggcagagtcatatccgcggtattccagacgacgtaaaccttcaagaaggatttctgctacatcacgttgcgcgatcgcgccaacaattccacacatagtttttgattccgatttatatcgttgtcggtcaacctgtatgcccgttttttcgggcgccccgagccttgtagagagtggggttatttttatagttactgcttgtgggagggagattatgttatctcctcatcccatgtgaccgggttagccggccagaatcactttttctttaccggacgacgccagccttctttctgagtctgcggcacacggctgatagctaatgcattttcgccgacattacgcgtcacagttgtacccgcagcaatggtcgcgcctttgcctactgttaccggggccaccagctgagtgtcggaaccaacaaacacatcgtcgccgataatggtcttaaatttattcgcaccatcgtagttgcaggtaatggttcccgcgccgatgttaacgttatcgccaatttccgcatcgcccaggtaagtcagatgaccagctttgctgcctttacccagacgcgcttttttcatctcaacgaagttaccgacgtgagcaccttccagcaactcagcaccaggacgcaaacgggcaaacgggccaatggtacaggccgctgccagattcgcatcttccacaacggtatacggactgatttcgcaatcatcgccaatcacgctgtttttaatcacgcaaccggtgccaattttcacgcgatgaccgagagtcacgttgccctcgatgataacgttagtatcaatttcaacatcgcgcccgtgagttagcgtaccacgcagatcaaaacgcgctggatcgcgcagcataacgcctgctaacagcagtttttcagcctgttcggactgataaacacgctccagacgggagagttgcaggcggttattcacgccttctacttcgcttaaacgttgcggatgaacggcgacgatttcacgcccttcctgatacgccagcgcaataatgtcggtgatgtagtattcgccctgagcattattgttggtcagcttcgccagccagcgtttcatatctgcgccgttggcaatcagaatgccggtgttgatctcctgaatctgacgctgctcgtcggtggcatctttgtgctcaacaatgccggtaactttgccgttttcacgggtgatacgtccataaccggtcggatcatccagtttcaccgtcagcagaccaatgccaccctgcggtttagcatcacgcagacgctggagtgtttcgacagagatcagcggcacgtcgccgtagagcattaaaatgtcttcatcatcggcaaagaaaggtgcggcctgctgcattgcatgacccgtacccagctgctctgcctgaagcacccagttaaggttgtcgtctttcagcgcctgttttagcagatcgccgccgtgaccgtacaccaggtgaacgtgcgctgcgcctaattcattcgcagcatcaatgacatgctgaaccatcgctttcccggcaagggtatgcagcactttcggaagatcggaatacatgcgcgtgcctttgcctgcggcaaggatcactacgctcatagcattattcaacatacgcgtcctgactgtaatttgagaacgaatttaaaccgcttcaccttgaaaaaactacatttttttcatcgtgaaatggacagaggataaattgttcaataacggattatccccgctgacgaaagcgccattttcgaccatcgtcacgccttttgtctgcagaaaattaaggcagtaccttaatttaagcgtcaggtggatgtttttgctcttatttcgatcaatgaataaacaggaaaacaggggggttttatatcagcaggatctatgtgaacgctattcaggacgggtcacacgcgcaaaaaaaagccagcctgtttccagactggcttttgtgcttttcaagccggtgttacatcgcttttttggtcaactcgataacgcgcagctgcgcgatcgctttggccagttccgcagacgcctgagcgtaatctacgtcgccgtgagagctgctaatgtgctcttcagccttacgtttcgcttccatggctcgcgcttcgtcgagatcctggccgcgaattgcggtgtcggccagaacggtcacgttgccaggctgcacttcaagaatgccgccagacagatagataaactcttcgtgaccgtgctgtttcacgatgcgaatcataccaggcttaatggcggtgagcagcggtgcgtggccagggtagatccccagttcaccttcgctacccgttacctggattttctcgaccagaccagagaacatttgttgctctgcgctgacgacgtccaggtggtaagtcattgccatatcaccctccgattaaggcgttaaagttttttggctttttccacagcttcttcgatggaaccgaccatgtagaacgcctgctccggcaggtgatcgtattcgccttccatgatgcctttaaagccacggatggtgtctttcagggagacgtatttacccggagaaccggtgaatacttctgccacgaagaacggctgggacaggaagcgctggatcttacgagcacgcgctaccaccagtttgtcttcttcagacagttcatccatacccaggatggcgatgatgtctttcagttcctgataacgttgcaggatggactgaacgccacgcgcggtgtcgtagtgttcctgaccaaccaccagcgggtccagctgacggctggtggagtccagcgggtcaacggccgggtagatacccagagacgcgatctgacggctcagtaccacggttgcgtcaaggtgcgcaaaggtggttgccggagacgggtcagtcaagtcatccgcaggtacgtatactgcctgtacggaggtgatagaaccagttttggtggaggtgatacgttcctgcagaacgcccatctcttccgccagggtcggctgataacctaccgcactaggcatacggcccagcagtgcggatacttccgtaccggccagggtgtaacgatagatgttgtcaacgaacagcagaacgtcacgaccttcgtcacggaatttctcagccatggtcagaccggtcagagcaacgcgcagacggtttcccggcggctcgttcatctggccatacaccagggatactttgtcgataacgttggagtcggtcatttcgtggtagaagtcgttaccctcacgagtacgttcacctacgcccgcaaacacagagtaaccggagtgctcgatcgcgatgttacgaatgagctccatcatgtttacggttttacctacacccgcaccaccgaacagaccaactttaccgcccttagcgaacggacacatcaggtcgataactttgataccggtttccagcagttcctgagagttactcagctcttcgtaggaaggtgctgcgcggtgaatcgcccaacgctcttcttcaccgatctcgcctttcatgtcgaccggttcacccagtacgttcatgatacggcccagagtcgctttacctaccgggacttcaatcgggtgttcgaggtcttttacatccagaccgcgacgcagaccgtcggaggaacccattgcgatggtacgtacgataccgccgccgagctgctgctgaacttccagcaccagacgctcattaccattttgcacctcaagagcatcgtacacgcgcggtacggcatcctgagggaattcgacgtcaactacggcgccgattacctggacaatctttccagtagccatcttaaatcctctacgaaataacctgtttaaaccgcggcggccccgctgacgatctcggtgagttcctgagtaatgctggcctgacgagctttgttgtataccaactgcagctctttaatcaggctgccgccattgtcggtcgcggctttcatcgccaccatacgggcggcctgctcgctggccaggttttcaaccacgccctgataaacctgagattcgacataacgacgcagcagggtatccagcaacgccttcggatcgggttcgtacaggtaatcccaggatttatgtttcagatcatcatcatcacttgccggtaacggcagcagctggctgatggtcggaacctgagacatggtgttaataaatttgttgctgacaatgtaaagcttgtccagacggccttcgtcgtaggcctgcaacatcacttttaccggaccgatcagttcggacagggaagggttatcccccatgccggtgacctgggcaacaacattgccgcccacggagttgaagaagctcacgcctttgctgccgatcattgcgaggtcgcattgaacgcctttgtcggtccaggtcttcatttccgccagcagttttttgaacaggttaatgttcaaaccaccgcacaaaccacggtcggtgctcaccaccaggtagcccacgcgtttaacgtcgcggtcttccaggtaagggtgcttatattccagattaccgtgtgcaaggtgaccaatcactttgcgcatggtttctgcataaggacggctggccgccatgcgatcctggcttttacgcattttggaagcggcgaccatctccatcgctttagtgatcttttgcgtgttctggacgcttgcgatcttactacgtatctcttttgcgccggccatgagcttctcctcaatgccttgcggcctgccctaaggcaagccgccagacgttaccaggattgggttgctttgaaggaatcgaggatgcctttcagcttgccttcgatttcgtcgttgtagccaccggtctggttgatctcttgcatcaacggagcgtgatcacggtcgacgtaagccagcagagcggcttcgaagctgccaattttgctcagttcaacatccgccaggtaaccacgttctgctgcgaacagaaccagagactgctgcgcaacggacatcggcgcatactgtttctgtttcagcagttcggtcactttctgaccgtggtcaagctgcttacgtgttgcatcgtcaaggtcggatgcaaactgagagaacgctgccagttcacgatactgtgccagagcggtacggataccaccggacagttttttcatgatcttggtctgtgctgcaccaccaacacgggatacggaaatacccgggttaaccgcaggacgaataccggcgttgaacaggttggtttccaggaagatctgaccatcggtaatggagattacgttggtcggaacgaacgcagaaacgtcacccgcctgagtttcgataatcggcagtgcggtcagagaaccggttttccctttcacttcacctttggtgaaggcttcaacgtattcggcgttaacacgtgcagcacgctccagcagacgagagtggaggtagaaaacgtcgcccgggaatgcttcacgtcctggcggacgacggagcagcagggagatctgacggtaagcaacagcctgtttagacaggtcatcgtaaatgatcagcgcatcttcaccgcggtcacggaagtattcgcccattgcgcaaccggcatacggtgccaggtattgcagtgcagcggattcagacgcggttgctaccacaacgatggtgttagccagtgcgccgtgctcttccagtttacgtaccacgttagaaatggtggacgctttctggccgatagcgacatagatacatttgataccggaatcgcgctggttgatgatggcatcgatagccagtgcggttttacctgtctgacggtcaccgatgatcaattcacgctgaccacgaccgattgggatcatggagtcaacggctttataaccggtctgtaccggctgatctacggactgacgttcgataacgcccggagcgattgcttctacagcagagaagccgtcgtgatccagcggacctttaccgtcgattggtgcacccagagtgttaaccacacggcccagcaggccacggccaaccggaacttccaggatacggccagtacacttaactttcatgccttcggcaaggtcagcgtacggacccataacaaccgcacctacagagtcgcgctcgaggttcagtgcgatagcgtaacggttacccggcagggagatcatttcaccctgcatacaatcggccaggccgtgaatgcggataacaccgtcacttacagaaacaatagtaccttcgttgtgagcttcactcacaacattgaactgagcaatgcgctgcttgatcagttcgctgatttcggtggaattcagttgcatgctccagtccccttaagactgcaagacgtctgcaaggcgctcaagacgaccgcgtacgctgccatcaatgaccatatcacccgctcggatgataacgcctgccattacagacttatcgattttgcaattcagcttaactttgcgactcagacgtttttccatcgcagcagaaattttcgcgagctgttgttcactcagtgcggcagcggaaatgacgtctacctcagcggtagcctcactcacggcacgcaggtgaataaactgctccagaacatccgggagcgcgttaagacgaccattttcagccataacccgaatcaggttctgaccgttttcgtccagttgctcaccacaaactgcgataaagctctcggcgagcgtttctggcgcaagcgcgccagagagaagctctgccatttgttcgtttttggttacctcggcggcaaacgccagcatgtcctgccagcgttctacactttggtgttcgacggcaaagtcaaaagctgctttggcgtaggggcgagctaccgtaataaattcagacatcagcccctccctccttacagttcagcgacaagtttatccacgatgtcgctgttagcagcttcatccacggaacgttcgatgatcttctcggcgccagcaacagccaggatagcaacttgcttacgcagctcttcacgggcacgtttacgctcggcttcaatttccgcctgcgcctgggccacgattttagtacgttcctgttctgcctcagctttcgcttcgtccagaatctggctgcggcgtttgttcgcctgctcgatgattacctgggcttccgctttcgcttttttcagctggtcggtcgcgctggcctttgcaaggtcaaggtccttatgtgctcgttctgcggaagcaaggccgtcagcaatttctttttgacgtttttcgatggctgccattaatggcggccatacgtacttcatgcagaacagaacgaacaggacaaacgcgatggcctggccgaggattgttgcgttaagattcacagcacaatgcctctatttagttaacgttctgatattgctctttaaataaaagcaacgcttattacgcgacagcgaacatcacgtacagacccagacctacagcgatcatcgggatagcatccaccagacccataacgataaagaactgagtacgcagcagaggaatcagatcaggttgacgcgctgcgccttccaggaatttacccccgaggatgccgataccgatcgcagcaccgattgccgccagacccatcatcacagcggcagccatgtacagcagatccatattcaggttttccatgacagtctccagtttgtttcagttaaaacgtagtagtgttggtaaattaatgttcttcagacgccatgctcagatagacgatcgtcagaaccatgaagatgaaggcttgcagcgtaatgatcaggatgtggaaaatggcccacggcacattcaggatccactgactccaccacggcaacagaccagcaatcagaatgaaaatcagctcaccggcatacatgttaccgaacagtcgcaaaccgagactaactggtttggacagcaggcttaccccttcaaggattaagttgacaggaatgaacgcccagtgattgaacggctgcagcgtcaactctttcgtgaagccgccgatgcctttcattttgatgctgtagaacagaatcaggataaatacgcccagtgccatagacagcgttacgttcacgtccgcagacggaaccacacgcagtgcaggcagacccagtacatgttcagcaatgtacggcagcaggtcgataggcagtaaatccatcaggttcatcaggaatacccagacgaagatcgtcagggccagcggagcaatcagcttgcttttgccatggtacatgtctttcacgctaccattaacaaagccgatcaccagctcaatcgcggtctgaaacttacctggcacaccgctggtcgcctttttggctacgctacggaataaaaccaggaacaacagacccagcaccacgctgaagaacatggagtcaatattgattgtccagaaggtggctggggggttttgtggatccaccaggctgaatgtacgcaggtccagctgaaggttattcaggtggtgtcctatgtaatcctgcggcgtcatattttcactagccatgatgccttttaccctttgttgttaattacagccggtgccagtatctgaaccaccagcaccaaaacccacgtaacgatcagcggcaagaataccgcctttaaaaccgccaacgccaccaccagtaacaccaacatcgccagaactttgaaagcttcgccaaatgcgaatgtccaggccacccggcctttcgctggtgtatgcgcctggtgacgccaggcaaatatcataaacaaaacgttaggcagaaagactgccaggcccccgcttattgcagagacgccccagaaggggtctttgaggctgaacagcaatccacttgctatcaccaccagtaactgaacgagcagaagcttccgagcaacgtttcgactcacgaggctcacagacatcacgtttttcactcctgctcccttcgaggtatgccgcgtgtcgtataaaactttctttaaggcttagagtcaagcatcaaaaagcggtcaaattatacggtgcgcccccgtgatttcaaacaataagtagccaaaaggtgaataaatgtttaaatatttttccagtgcatacaattgcgacttttctgctaaccctgttcgatcatgaaaaactgtaaataacgcgtaaacactggtgataaagcgtgcttcagatcacatattgcgcatgttcgcgcacagcatatttatttacttggcaaatgatgcctttgcaagtttatgatatttcagtctaaaaacagatactgttttaataaatgacatttacacaacaaaaaccacccattgacatttttaataatgttttaacagccaatgatggttcttagcgccgatttttagcagactgatattttcactaatgacttattttctgcttaccaaaaaaagccacgttatcttgttgatgcaaaagagtgaacgtggcgttaaatgtaaccagttatatcagtagaaaacctggttgttgttaacagtctaaccggtcaattttttatgatttttttgataaaaattaaattttatttgctttaatcaccaccagatgacgttcgccatccagggctggaacctgaagtttaaccacactttcgacctgatattcttcgggcaacaaagcgatttcatcttccggcatttgccctttcagcgcgtagaaacggccttgctcaccaggaagatggtggcaccagctcaccatatcgttcagagaggcaaaagcgcggctaattacgccatcaaatggcggctcactaggaaactcttctaccctgctctgtactggttcaatattctccagtttaagctcatgttgcacctgacgaaggaaacgcacgcgtttaccaaggctatccaacagagtgaaatgggcttcaggacgcacgatagagagtggaatgcctggcagtcctggtccggtgccgacatcgataaaccgttcaccttgcagatacggtgccaccacaatgctatcgagaatatggcgtaccagcatctcattaggatcgcggacgctagtcaggttgtacgctttgttccatttatgcagcatattcacgtaggcaataagctggtttttctggtgatcggtaaggctaatacctgcgtctttcagcagtaaggagagtttgttgagcacggtgattacctgttcttgatgcgttgcctggtaagcgggtgcttaccaggcatttttaatgcgttatgcgctacgacgcagcataccctgttttttcagccacaccagcagaatggagatggccgcaggcgtgacgccagaaatacggctagcttggccgatagaggctggtttgtgatcgttaagtttggcgatcacttcgttagaaagaccggatacctggcggtaatccagtgtcgcgggtagcagggtgttctcgttacgcagctgcttttcgatctcatcttgctggcgcgcgatataaccttcgtatttaacctgaatctcaacctgttccgccgcctgttcgtctgtcaacgcaggggcaaacggcgtcagcgtggttaatttttcataagtcatttccggacgacgcagcagatcttcaccactggcttcacgggaaagcggcgcagtcaggtgagcattcacttcggctgcagcttccgcgctcggggttacccaggtgcttttcagacgctgacgctcacgctcgatattctcaagtttctcgttaaagcgcgcccaacgttcgtcatccaccaggcccagttcacgaccgatttcagtcaaacgcagatccgcattatcttcgcgtagcatcagacgatattctgcgcggctagtaaacatacgatacggttctttggttcctaaagtgcacaggtcatcaactagtacgccgagatacgcctgagaacgtgccggagcccaaccttctttgtcagcagacagacgggcagcgttaagaccggccagcaaaccttgcgcagcggcttcttcgtaaccggtagtgccgttaatctgaccagcaaagaacagcccctggataaacttgctctccagcgtcggtttcaggtcgcgaggatcgaagaagtcatactcaatggcataacccggacgcacgatcttcgcgttttccatcccctgcatagagcggacgatttgcatctgcacatcgaacggcaggctggtggagataccgttcggataaatttcattagaggtcagtccttccggttcaaggaagatctgatgctgatttctgtcggcgaagcgcatgactttgtcttcgatgctcgggcagtagcgtgggccgacaccttcgatcacccctgcgtacattgggctacgatcgaggttactgcggatcacatcatgggttttctcgttggtatgagtgatataacacggcacctgctggggatgctgggacgcattgcccataaagctgaataccggcattgggttatcgccatgctgttgcgccagtacgctaaagtcgatggttcgagcatcaatacgcggtggtgtcccggttttcagacgaccaacgcgcagcggcagttcacgcaaacggcgagaaagcggaatggacggcggatcaccagcacggccaccgctgtaattatccagaccgatatgaattttaccgtcgaggaacgtcccaacggtgagcacgacggctttggcacggaacttcagtcccatttgggtaacagcaccgaccacgcgatcgttttcgacaataagatcttcaaccgcctgctggaagatcatcaggttcggttggttctccagcgccgtacgtaccgcctgacggtagagcacacgatccgcctgagctcgggtagcgcgaaccgccggtcctttgcttgcgtttagtatcctaaactggatacccgcctgatcgatcgctttcgccatcagaccgccgagtgcatccacttcttttaccagatgtcccttcccaataccgccgatcgccgggttgcagctcatctgccccagagtgtcgatattgtgtgtcaaaagcagagtctgttgacccatacgcgccgcggccatcgcggcctcggtgcctgcatgacccccgccaatgatgatgacgtcaaaaggatccggataaaacatggtgattgcctcgcataacgcggtatgaaaatggattgaagcccgggccgtggattctactcaactttgtcggcttgagaaagacctgggatcctgggtattaaaaagaagatctatttatttagagatctgttctattgtgatctcttattaggatcgcactgccctgtggataacaaggatccggcttttaagatcaacaacctggaaaggatcattaactgtgaatgatcggtgatcctggaccgtataagctgggatcagaatgaggggttatacacaactcaaaaactgaacaacagttgttctttggataactaccggttgatccaagcttcctgacagagttatccacagtagatcgcacgatctgtatacttatttgagtaaattaacccagcttcccagccattcttctgccggatcttccggaatgtcgtgatcaagaatgttgatcttcagtgtttcgcctgtctgttttgcaccggaatttttgagttctgcctcgagtttatcgatagccccacaaaaggtgtcatattcacgactgccaataccgattgcgccaaagcggactgcagaaagatcgggcttctgttcctgcaatgcttcatagaaaggagaaaggttgtccggaatatctccggcaccgtgggtggagctgataaccagccagatcccactggcaggtaaatcttctaacagcggaccgtgcagcgtttcggtggtaaaacccgcctcttccagcttttcagccaggtgttctgctacatattcggcaccgccgagggtgctgccgctgataagagtgatatctgccataaaccgccacctttattaagagtggcgtattgtacgctgtgaacgcgttgggatctacctgtggaaaagtatgggattaaaaaagccgatcagggcttgatggtacgcatgatcgggttttgcaggacgatcaatgtctcggtggactgaatttcatcaattgtttggatcttgttgataagtacatgctggagagcgtcgatgctacggcacatcacttttataaagatgctgtagtggccggttgtgtaataggcttcagtgacttcatcaaggctttccagctttgccagcgcggaagggtagtctttggcgctctttaatataatgccgataaagcagcctacgtcataaccgagctgcttcgggctgacatcaatacgcgccccggtaatgatccccgcctgcttcattttctctactcgaacgtgaatcgtccccggactgacgccaaattgtttcgccagttcggcgtaagcggtgcgcgcattgcccattaatgcttccaggatgccacggtccagattgtcgatcagataattttccataggattttcttatgcggattgatgattcattctattttagccttcttttttaatgaatcaaaagtgagttaggctttttattgaatgattattgcatgtgtgtcggtttttgttgcttaatcataagcaacaggacgcaggagtataaaaaatgaaaaccgcttacattgccaaacaacgtcaaattagcttcgtgaaatctcacttttctcgtcaactggaagaacgtctggggctgatcgaagtccaggcgccgattcttagccgtgtgggggatggcacgcaggataacttgagcggctgtgaaaaagcggtgcaggtaaaagtgaaagctctgcctgatgcccagttcgaagtggttcatagtctggcgaagtggaaacgtcagaccttagggcaacacgacttcagcgcgggcgaagggctgtacacgcacatgaaagcccttcgccccgatgaagaccgtctttctccgttgcacagcgtctatgttgaccagtgggactgggaacgcgtaatgggcgacggtgagcgtcaattcagcactctgaaaagcacggtagaggcgatctgggcgggaattaaagcaaccgaagctgcggttagcgaagagtttggcctggcaccgttcctgccggatcagatccacttcgtacacagccaggagttactgtctcgttatccggatcttgatgccaaagggcgtgagcgggcgatagcgaaagatcttggcgcggtattccttgtcgggattggcggcaagctgagcgatggtcatcgccacgacgtgcgcgcaccggattatgatgactggagcaccccgagtgagctgggccatgcgggtctgaacggcgatattctggtgtggaacccggtactggaagatgcgtttgagctttcctccatggggatccgtgtagatgccgacacgctgaagcatcaactggcgctgaccggtgacgaagatcgcctggagctggagtggcatcaggcgctgctgcgcggtgaaatgccgcagaccatcggcggcggtatcggccagtctcgtttgactatgctgctgctgcaactgccgcatatcggccaggttcagtgtggagtatggccagctgctgttcgcgagagcgtcccttctctgctgtaataatttatcgccgccagcgtctgagcaggcggcttcgcatcccggtatcaaagcgccagatatgatcgaaaatgcgcatgatgccgggtttgccgtgtgcgctcatcgccacggcatgaaagcgatgctgatgtacccgctgcagctctttcactttactcgtcacgtcgtcaggcaaccgctgagcgataaaatcagaaatcaccaccgcatcggcatcaaaccattccctgctttgcaagcgttccataatggcgcgaaaacaactggcaagatcggtgccgccacgaaactgctggcttaaaaaacggattgcttgttcgatgccttgtgggccactaagctcataacggacgatctcggtggaaaatagcataatatagcagcgccggttttctgcgagagcaatgcgcatcaaggccaggcagaacgctttcgcacactgttcattaaagccgcccatactgccggaagtatccacacagacaataaacggcccgcgcggctgttcatcgtaatctttatgtaccaccggacgttcgatcactttttcacgccagctctcaccgtgcaggcgataggtgagcaactgtttttccaccagccgacggtaaaactcatactccagttccgttatccctagtgtcgccagttctggcggcaggagacgtaaaatatcatcgctttgttgcagaccatcaacctgctcaggaaccgtcgccggttcgcgcaccatggtgcggaaggtttccatctgcgcatcgttgcgcggtatacttttggcttcccgagaacgccccagctgctctgccaggcgtttcagttccggctgttcgttaagaaattcaccgtatttcacaatcaactgatagtcgccacgtttaagctgaccggcgctcatatcccacagacgaccagctgcagtattgttatctgcgagaatcggttcaagttgtccgctcagcgtcatgcgttcctgaacttcactcaacagttgttcgcgttcttcttctaatagctgttgatttaacgtcgttgcttgcacgatcagacttaaacgccaacgctggagaaaaagcgtgtgtaacgcactagtgatcgtgctgttagcatcaaccaactgtcgggcttgttctgcccatggagaattcagacgatgcagtaagtccaggatctgtggtagctgcacaataaactgtggcgtggagaggagctggctttgctgatagcacatcacctcttcggtgagttccggcgggactcgggcatctttcagccgactgcgcagcgcttcacgccagcggggaacatcatcagtgattgccgccttcaggcgtgggaatttttcaaagaagaccgccagctgcggactggccagcagtgcgatgatcatctcttcgatcaatccctcttcgctgacggccagcatcacattaagcgtatccagcgttagcattgttgtgcctggcgaatctgtgcaccgacatcctgtaggctggcttcaatgcgacctaaccagtcgccagggataaacagacatttttgctgttcgctgaataaagcgtgttgcttgcgccagtcgctttcaagctcttccagttgttgttttatttcaccaggcagaccttcagcgctactaccgggaagtgccagcgtactgccttgtaaacttacatcgcgaacgacaagatgttgggcgctatcaacttccagattcagtttctgggcaaagccgataccgttcagtttaccgcgaatttcaccacctttgctcagccactgttccagcgcgctacgctcaaaggagatatgaaccacttccatatcatgcagttttaacggtttttgcagcagtagagtcagagtggaagcagtaacgttaacaggaagttgatactgctgacgacggctgaaaatgccgcccagacgaattaccgttaaggctgttttatcgctttgttgctgctggagttgcaggtgacgttgcacaatcgcgccaaggcgagtcaacatcccttgctgttgccaggcgtgaccggtcatcaatacatcaatttgttgttgtatcaaattcaggctttgcgcgtcataccacaggcaatctttcagcaaaatgagatctaccggggcaacagcactgcgaccgctaaaaaaggcgctggcctgcaataatcggatcgcttttttccagcgacgatcgctgacataaggcgcatccggtaatttatccagttgctggcgcagcataaaaatcagctcaaatacatgatcgggcagcgtaatttcaccaatctctttctgccagcgttcatattcttcatctgtgacctgcaaggcatcaggaaccggattgtcgttttcatcctgttgactggtcagcatggagcggaaattcgctttatcctgcactttatctaaccacagacgaatcagcatgcggtcatataacgcttccagactgctgtctgcttccggcagctcgttggaggccgccaccagcagacgcatcgggattttttctacgtgtgcaccgttgcggaactggcgctcgttaatggcggtgagcaaggtattaagaattgccgggcccgctttccagatctcatccagaaagacaatttctgcttccggcaggtaaccgctggttaaacgttcatagcgcccttcatcttttagcgcctgaatagaaaggggaccaaaaacttcttccggcgtggagaagcgggtcatcagatattcaaacgcgcgggcattctgaaaggcgaattttaagcgccgggcgatcaaacttttggcaatacctggcgggccaaggaggaacacactttcaccacttaatgccgctaataaacacaagcggatggcgtggctacgttcataaagccccttttccaagctactgctcaggcgggaaattctttccgctaataaatgagggtgagccataatgaagtggcgtcctttcgtcaaaagttctgcgtaaattgcgagtatagacgtttcttgctggtggctaaaatagtctcaaagggggggtatttttctttgagccaggttaatgtggccgcatttaggagtacgattttgccgttaatcgtgcatactgtgcgcttttttgtgggccaagggactaagcacacatttcatatttcaacgaaagactagtctatgagcactgataataagcaaagtttgcccgcgattaccctcgcggcgattggagttgtctacggcgatattggtaccagcccgttatatacacttcgtgaatgtttgtccggccagtttggttttggcgttgaacgcgatgccgtgtttggctttttaagcctgatcttctggctgctaatctttgtggtttccattaaatatctcaccttcgtgatgcgggcagataacgccggtgagggggggatcctgacgttgatgagccttgccgggcgtaatacgagcgcgcgaaccacaagtatgctggtgattatggggctaatcggcggcagctttttttatggtgaagtcgtcataacacccgctattagcgtgatgagtgccattgaaggtctggaaatcgtcgccccgcagctggatacctggatagttcccctcagtattatcgttctcactttattatttatgattcaaaaacatggcacggctatggtcggtaagctgtttgcgccgatcatgctgacctggtttttgattctggcaggactggggttacgtagcattattgctaacccggaagtgctgcatgcgctgaatccaatgtgggcggtgcatttcttccttgaatacaaaacggtttcttttattgcattaggggcagtggtgttgagcattacgggggtcgaggcgctgtatgctgatatggggcactttggtaagttccctattcgcctggcgtggttcaccgtcgtattaccttccttgacccttaattacttcggtcagggagcgctgttgttaaagaacccggaagcgattaagaacccgttcttcctgttggcaccggactgggcgctgatcccgctgctgatcatcgccgcactggcgacggtaattgccagccaggcggttatctctggcgtcttcagtttgacgcgtcaggcggtacgtctgggatatttgagcccgatgcgcattattcacacctccgaaatggagagtgggcaaatctatattccgtttgtgaactggatgctctatgtcgcggtcgtgattgtgattgtcagctttgagcactccagcaacctggcggcggcgtacgggattgcggtgaccggaaccatggtgctgacgtctattctcagcactaccgtggcacgtcagaactggcactggaataagtattttgttgcgctgatcctgattgctttcctttgtgtcgatattccattgttcaccgctaacctcgataaactgctctccggcggctggttgccattgagcctcggtactgtgatgtttatcgtgatgaccacctggaagagcgagcgtttccgcttgctgcggcggatgcatgaacatggtaactctctggaagcgatgattgctagcctggagaaaagtccgcctgttcgcgtgcccgggaccgcggtgtatatgagccgtgcaatcaacgtcattccctttgcgctgatgcataaccttaaacataacaaggtattgcatgagcgggtgattctgttaactctgcgcaccgaagacgctccatatgtccataacgtccgtcgggtacagattgaacaactgagccccactttctggcgcgtggtggcaagttatggttggcgagaaacgccaaacgtagaagaagttttccaccgctgcggtctggaaggattaagttgccggatgatggaaacctccttctttatgagccatgagagcttgatcctcggcaaacgcccgtggtatttgcgtctgcgcggcaagctgtacttgctgctgcaacgtaatgcgctgcgtgcaccagatcaatttgaaatcccgccaaacagggttatcgaactgggtactcaggtcgaaatctaacgccagacgcctcctttcttcataagggggcgtttttgttttcatggttaatcaccatgtaaaacgtttcgaggttgatcacatttccgtaacgtcacgatggttttcccaactcagtcaggattaaactgtgggtcagcgaaacgtttcgctgatggagaaaaaaatgaaaaaaggcaccgttcttaattctgatattagtagcgtgatctcccgtctgggacataccgatacgctggtggtgtgtgatgctggtttacccatccccaaaagtacaacgcgtatcgatatggcattaacccagggtgtaccttcttttatgcaggtgctgggcgtcgtcacaaatgaaatgcaggtcgaggcggccattatcgcggaagagatcaaacaccataatccgcaactccacgaaacgttgctcactcaccttgagcagctgcaaaaacaccagggaaataccattgaaattcgttacaccacgcatgaacaattcaaacaacaaaccgcagaaagtcaggcggtaattcgcagcggagaatgttctccgtatgcgaatatcattctctgtgctggcgtgacgttctgaggccgtcatggaagcattacttcagcttaaaggcatcgataaagccttcccgggcgtaaaagccctcagcggcgcagcgttaaatgtctatccgggccgcgtgatggcgctggtgggcgaaaacggcgcgggtaaatccaccatgatgaaagtgcttactggcatctatactcgcgatgccggtacgcttttatggctggggaaagaaacgacatttaccgggccaaaatcttcccaggaagccgggattgggattatccatcaggaactgaacctgatcccgcagttgaccattgccgaaaacattttcctcggtcgtgagtttgttaatcgctttggcaaaattgactggaaaaccatgtatgccgaagcggataaattgctggctaaacttaacctgcgctttaaaagcgacaagctggtgggcgatctttccatcggtgaccagcaaatggttgaaatcgccaaagtgctgagctttgagagcaaagtcatcattatggatgaaccgaccgatgcgctgaccgataccgaaaccgaatccctgttccgcgtcatccgcgagctgaaaagccaaggccgcggtattgtctatatctcccaccgcatgaaagaaatcttcgagatttgcgatgacgttaccgtttttcgtgatgggcaatttattgctgagcgcgaagtggcaagtctgaccgaagatagcctgattgagatgatggtgggtcgcaagctggaagatcaatatccgcacctggacaaagcgccgggagatatccgcctgaaagtcgataatctctgcggacctggcgttaacgatgtctcttttactttacgcaaaggcgaaattcttggcgtctctggtttgatgggcgcaggtcgtaccgaactgatgaaagtgctctacggcgcactaccgcgcaccagcggttacgtcaccctggatgggcatgaagtcgttacccgtagtccgcaggatggcctggcaaacggcattgtgtatatctccgaagaccgtaaacgtgacggtttagtgttgggcatgagtgtaaaagagaacatgagcctgacagcgctgcgctacttcagccgcgctggcggcagtttgaagcatgccgatgaacagcaggctgtgagtgatttcattcgtctgtttaatgtgaaaactccgagcatggaacaggcaattggtctgctttccggtggcaatcagcaaaaagtggcgattgcccgcggtctgatgacacgccccaaagtgttgatccttgatgaacctacccgtggcgtagatgtcggcgcgaaaaaagagatctatcaactgattaaccagttcaaagccgatggcttgagcatcattctggtgagtagcgagatgccagaagtattaggcatgagcgatcgcatcatcgtcatgcatgaagggcatctcagcggggaatttactcgtgagcaggccacccaggaagtgttaatggctgccgctgtgggcaagcttaatcgcgtgaatcaggagtaaaaaaatgacaacccagactgtctctggtcgccgttatttcacgaaagcgtggctgatggagcagaaaagccttatcgctctgctggtgctgatcgcgattgtcagcacgttaagcccgaactttttcaccatcaataacttattcaatattctccagcaaaccagtgtgaacgccattatggcggtcgggatgacgctggtgatcctgacgagcggcatcgacttaagcgtaggttctctgttggcgctgaccggcgcagttgctgcatctatcgtcggcattgaagtcaatgcgctggtggctgtcgctgctgctctcgcgttaggtgccgcaattggtgcggtaaccggggtgattgtagcgaaaggtcgcgtccaggcgtttatcgctacgctggttatgatgcttttactgcgcggcgtgaccatggtttataccaacggtagcccagtgaataccggctttactgagaacgccgatctgtttggctggtttggtattggtcgtccgctgggcgtaccgacgccagtctggatcatggggattgtcttcctcgcggcctggtacatgctgcatcacacgcgtctggggcgttacatctacgcgctgggcggcaacgaagcggcaacgcgtctttctggtatcaacgtcaataaaatcaaaatcatcgtctattctctttgtggtctgctggcaagcctggccgggatcattgaagtggcgcgtctctcctccgcacaacccacggcggggactggctatgagctggatgctattgctgcggtggttctgggcggtacgagtctggcgggcggaaaaggtcgcattgttgggacgttgatcggcgcattaattcttggcttccttaataatggattgaatttgttaggtgtttcctcctattaccagatgatcgtcaaagcggtggtgattttgctggcggtgctggtagacaacaaaaagcagtaataacgactacaggacatcttgaatatgaacatgaaaaaactggctaccctggtttccgctgttgcgctaagcgccaccgtcagtgcgaatgcgatggcaaaagacaccatcgcgctggtggtctccacgcttaacaacccgttctttgtaagcctgaaagatggcgcgcagaaagaggcggataaacttggctataacctggtggtgctggactcccagaacaacccggcgaaagagctggcgaacgtgcaggacttaaccgttcgcggcacaaaaattctgctgattaacccgaccgactccgacgcagtgggtaatgctgtgaagatggctaaccaggcgaacatcccggttatcactcttgaccgccaggcaacgaaaggtgaagtggtgagccacattgcttctgataacgtactgggcggcaaaatcgctggtgattacatcgcgaagaaagcgggtgaaggtgccaaagttatcgagctgcaaggcattgctggtacatccgcagcccgtgaacgtggcgaaggcttccagcaggccgttgctgctcacaagtttaatgttcttgccagccagccagcagattttgatcgcattaaaggtttgaacgtaatgcagaacctgttgaccgctcatccggatgttcaggctgtattcgcgcagaatgatgaaatggcgctgggcgcgctgcgcgcactgcaaactgccggtaaaagcgatgtgatggtcgtcggatttgacggtacaccggatggcgaaaaagcggtgaatgatggcaaactagcagcgactatcgctcagctacccgatcagattggcgcgaaaggcgtcgaaaccgcagataaagtgctgaaaggcgagaaagttcaggctaagtatccggttgatctgaaactggttgttaagcagtaattttaatcaggttgtatgacctgatggtgacataaatacgtcatcgacagatgaacgtgtaatataaagaaaagcagggcacgcgccaccctaacacggtggcgcattttatggacatcccgaatatgcaaaacgcaggcagcctcgttgttcttggcagcattaatgctgaccacattcttaatcttcaatcttttcctactccaggcgaaaccgtaaccggtaaccactatcaggttgcatttggcggcaaaggcgcgaatcaggctgtggctgctgggcgtagcggtgcgaatatcgcgtttattgcctgtacgggtgatgacagcattggtgagagcgttcgccagcagctcgccactgataacattgatattactccggtcagcgtgatcaaaggcgaaagtacaggtgtggcgctgatttttgttaatggcgaaggtgagaatgtcatcggtattcatgccggcgctaatgctgccctttccccggcgctggtggaagcgcaacgtgagcgtattgccaacgcgagtgcattattaatgcagctggaaagtccactcgaaagtgtgatggcagcggcgaaaatcgcccatcaaaataagactatcgttgcgcttaacccggctccggctcgcgaacttcctgacgaactgctggcgctggtggacattattacgccaaacgaaacggaagcagaaaagctcaccggtattcgtgttgaaaatgatgaagatgcagcgaaggcggcgcaggtactgcatgaaaaaggtatccgtactgtactgattactttaggaagtcgtggtgtatgggctagcgtgaatggtgaaggtcagcgcgttcctggattccgggtgcaggctgtcgataccattgctgccggagatacctttaacggtgcgttaatcacggcattgctggaagaaaaaccattgccagaggcgattcgttttgcccatgctgccgctgcgattgccgtaacacgtaaaggcgcacaaccttccgtaccgtggcgtgaagagatcgacgcatttttagacaggcagaggtgacgcttggctacaatgaaagatgttgcccgcctggcgggcgtttctaccagtacagtttctcacgttatcaataaagatcgcttcgtcagtgaagcgattaccgccaaagttgaagcggcgattaaagaactcaattacgcgccaagtgctctggcgcgtagcctcaaactcaatcaaacacataccattggcatgttgatcactgccagtaccaatcctttctatagtgaactggtgcgtggcgttgaacgcagctgcttcgaacgcggttatagtctcgtcctttgcaataccgaaggcgatgaacagcggatgaatcgcaatctggaaacgctgatgcaaaaacgcgttgatggcttgctgttactgtgcaccgaaacgcatcaacctagccgtgaaatcatgcaacgttatccgacagtgcctactgtgatgatggactgggctccgttcgatggcgacagcgatcttattcaggataacagcttgctgggcggagacttagcaacgcaatatctgatcgataaaggtcatacccgtatcgcctgtattaccggcccgctggataaaactccggcgcgcctgcggttggaaggttatcgggcggcgatgaaacgtgcgggtctcaacattcctgatggctatgaagtcactggtgattttgaatttaacggcgggtttgacgctatgcgccaactgctaagtcatccgctgcgtcctcaggccgtctttaccggaaatgacgctatggctgttggcgtttaccaggcgttatatcaggcagagttacaggttccgcaggatatcgcggtgattggctatgacgatatcgaactggcaagctttatgacgccaccattaaccactatccaccaaccgaaagatgaactgggggagctggcgattgatgtactcatccatcggataacccagccgacccttcagcaacaacgattacaacttactccgattctgatggaacgcggtagcgcttaattactcgctttcacttggaacgcggttcggcttagatttacgctgtcttttgatcaaattattaccatcggttgttttcagaagcatgaacattgctgcactagcaacagtaataatgcccattgtgataaacgtatagtggaattgttcgacagtcgttgtgccttccattccttcataaacgcgaaggacggccgcacttacagcaacgcctaaactaatgctcagttgctgcgtgaccgccagaacactgttaccgctgctggcattgtcatcggtcagatcggcaagtgtgatggtattcatcgcggtaaactgcgtgctcatagccatccctaatataaacaacggcaagatcagcatccatatagccattgctggactttgcaaagagaactgagcgatcattagcccaataatcaccgtgatccccactaacgtatggcgatagcccagacgacgtaagacttgggtaaccatgctttttgcaataatggaacctaacgctgtcggtgccatcatacagccagcaataaacgcctgataaccaaatcctacctgtaacatcaatggcataaggaacggtacacagccggtccccagacgggttgcaatattgcctacgataccgatgctgaaagtgcgggttttaaataaatctaaactaattaatgggtttggcgtgcgtcgtgcatggagaatatagagaagcagtaacccgatgctggtgacaattaccgtcaaggcaatccagctggcgacaatcttttccccgaatagctctattccgctactgaagagaacaaggctgaggccaaacagcaaaaagccagtgatatcgaatctgcgtcgtgcggtggtgaaattgggcatatgtttgcgcgcgtaaagaaggcccgcaatacctatggggatattgattaaaaatatccagtgccaggttgcccaggtgaccagcacgccgccaagaacggggcctaaaattggccccaccagacccggcatggcgacaaaattcaatactggaagaagttcattacgaggataagcgcgcagtaaggccagccgagcaacaggcatcatcattgcgccgcctatcccctgaataacccggaagacaaccagctgtggtaggctattagaaagtgcgcaggccagagaacccaatgtgaacagactcacggcaagggtaaaaatgcgacgcgtaccgaagcgatcggctagccatccgcttaccggaataagcatcgccaccgtcagcgtataactgatgatggcactttgcatcgcgagaggagaacgattaaggctatgagcgattgcgggtaaggcggtattaagaatagtggcatcaagtgcctgcatgaagaaggccatcgccgcgatccacggcaaacccgccatactgcgcttctttttatcgctcattcaatgtcctgttatcgggttatcacttatcaggactgcgtagcagcgcctgacaagctttaaatgccgcgtcgccatcgctttggataatcgcatcgacaatcgcctgatgcagatccagctttatcactgtgtcgctggtaatactcgtgaagtaagtgtgataaacgctatggaataggctggcgaaactggtcaaaaacggattggcgctcatttcatagatatgctcatgccaggccatatcgacttcgatccagcgttcacggcgaaagttctcttttaatgccgccatttcggccattaacgtattgagatgcgctttctgttccgcggtgccaaccgttgctgccagtaggcaggcttgcggctccagacagatacgcataaccagaaagtgatcgatgacctgatgaaagttctcttctgtcatccaccaggtaagcaattcctgatcaagaaaattccagttgctttgtggcatgacccgagtaccaattcgcggtcgcggtaaaaccatcccttttgccgttaacgttttgaccgcttcgcgtaccgctgtacgactcactccaaattgctcgcccagctcaatctcaccgggcaaaatggtgccgggttcatattcaccttttaagatccgttgcgccagcttctcagccagaacatagctaaggtttttctgtgcagctaactgttgtgcgcttaaaggcattacttatcttcctttttctttttattcctccttagtatgccaccaggaagtgtgattacggttgcaaaaacggcaaattgcttgttttatggcacattaacggggcttttgctgaaaaaatgcgcggtcagaaaattattttaaatttcctcttgtcaggccggaataactccctataatgcgccaccactgacacggaacaacggcaaacacgccgccgggtcagcggggttctcctgagaactccggcagagaaagcaaaaataaatgcttgactctgtagcgggaaggcgtattatgcacaccccgcgccgctgagaaaaagcgaagcggcactgctctttaacaatttatcagacaatctgtgtgggcactcgaagatacggattcttaacgtcgcaagacgaaaaatgaataccaagtctcaagagtgaacacgtaattcattacgaagtttaattctttgagcgtcaaacttttaaattgaagagtttgatcatggctcagattgaacgctggcggcaggcctaacacatgcaagtcgaacggtaacaggaagaagcttgcttctttgctgacgagtggcggacgggtgagtaatgtctgggaaactgcctgatggagggggataactactggaaacggtagctaataccgcataacgtcgcaagaccaaagagggggaccttcgggcctcttgccatcggatgtgcccagatgggattagctagtaggtggggtaacggctcacctaggcgacgatccctagctggtctgagaggatgaccagccacactggaactgagacacggtccagactcctacgggaggcagcagtggggaatattgcacaatgggcgcaagcctgatgcagccatgccgcgtgtatgaagaaggccttcgggttgtaaagtactttcagcggggaggaagggagtaaagttaatacctttgctcattgacgttacccgcagaagaagcaccggctaactccgtgccagcagccgcggtaatacggagggtgcaagcgttaatcggaattactgggcgtaaagcgcacgcaggcggtttgttaagtcagatgtgaaatccccgggctcaacctgggaactgcatctgatactggcaagcttgagtctcgtagaggggggtagaattccaggtgtagcggtgaaatgcgtagagatctggaggaataccggtggcgaaggcggccccctggacgaagactgacgctcaggtgcgaaagcgtggggagcaaacaggattagataccctggtagtccacgccgtaaacgatgtcgacttggaggttgtgcccttgaggcgtggcttccggagctaacgcgttaagtcgaccgcctggggagtacggccgcaaggttaaaactcaaatgaattgacgggggcccgcacaagcggtggagcatgtggtttaattcgatgcaacgcgaagaaccttacctggtcttgacatccacggaagttttcagagatgagaatgtgccttcgggaaccgtgagacaggtgctgcatggctgtcgtcagctcgtgttgtgaaatgttgggttaagtcccgcaacgagcgcaacccttatcctttgttgccagcggtccggccgggaactcaaaggagactgccagtgataaactggaggaaggtggggatgacgtcaagtcatcatggcccttacgaccagggctacacacgtgctacaatggcgcatacaaagagaagcgacctcgcgagagcaagcggacctcataaagtgcgtcgtagtccggattggagtctgcaactcgactccatgaagtcggaatcgctagtaatcgtggatcagaatgccacggtgaatacgttcccgggccttgtacacaccgcccgtcacaccatgggagtgggttgcaaaagaagtaggtagcttaaccttcgggagggcgcttaccactttgtgattcatgactggggtgaagtcgtaacaaggtaaccgtaggggaacctgcggttggatcacctccttaccttaaagaagcgtactttgtagtgctcacacagattgtctgatagaaagtgaaaagcaaggcgtttacgcgttgggagtgaggctgaagagaataaggccgttcgctttctattaatgaaagctcaccctacacgaaaatatcacgcaacgcgtgataagcaattttcgtgtccccttcgtctagaggcccaggacaccgccctttcacggcggtaacaggggttcgaatcccctaggggacgccacttgctggtttgtgagtgaaagtcgccgaccttaatatctcaaaactcatcttcgggtgatgtttgagatatttgctctttaaaaatctggatcaagctgaaaattgaaacactgaacaacgaaagttgttcgtgagtctctcaaattttcgcaacacgatgatgaatcgaaagaaacatcttcgggttgtgaggttaagcgactaagcgtacacggtggatgccctggcagtcagaggcgatgaaggacgtgctaatctgcgataagcgtcggtaaggtgatatgaaccgttataaccggcgatttccgaatggggaaacccagtgtgtttcgacacactatcattaactgaatccataggttaatgaggcgaaccgggggaactgaaacatctaagtaccccgaggaaaagaaatcaaccgagattcccccagtagcggcgagcgaacggggagcagcccagagcctgaatcagtatgtgtgttagtggaagcgtctggaaaggcgcgcgatacagggtgacagccccgtacacaaaaatgcacatattgtgagctcgatgagtagggcgggacacgtggtatcctgtctgaatatggggggaccatcctccaaggctaaatactcctgactgaccgatagtgaaccagtaccgtgagggaaaggcgaaaagaaccccggcgaggggagtgaaaaagaacctgaaaccgtgtacgtacaagcagtgggagcacgcttaggcgtgtgactgcgtaccttttgtataatgggtcagcgacttatattctgtagcaaggttaaccgaataggggagccgaagggaaaccgagtcttaactgggcgttaagttgcagggtatagacccgaaacccggtgatctagccatgggcaggttgaaggttgggtaacactaactggaggaccgaaccgactaatgttgaaaaattagcggatgacttgtggctgggggtgaaaggccaatcaaaccgggagatagctggttctccccgaaagctatttaggtagcgcctcgtgaattcatctccgggggtagagcactgtttcggcaagggggtcatcccgacttaccaacccgatgcaaactgcgaataccggagaatgttatcacgggagacacacggcgggtgctaacgtccgtcgtgaagagggaaacaacccagaccgccagctaaggtcccaaagtcatggttaagtgggaaacgatgtgggaaggcccagacagccaggatgttggcttagaagcagccatcatttaaagaaagcgtaatagctcactggtcgagtcggcctgcgcggaagatgtaacggggctaaaccatgcaccgaagctgcggcagcgacgcttatgcgttgttgggtaggggagcgttctgtaagcctgcgaaggtgtgctgtgaggcatgctggaggtatcagaagtgcgaatgctgacataagtaacgataaagcgggtgaaaagcccgctcgccggaagaccaagggttcctgtccaacgttaatcggggcagggtgagtcgacccctaaggcgaggccgaaaggcgtagtcgatgggaaacaggttaatattcctgtacttggtgttactgcgaaggggggacggagaaggctatgttggccgggcgacggttgtcccggtttaagcgtgtaggctggttttccaggcaaatccggaaaatcaaggctgaggcgtgatgacgaggcactacggtgctgaagcaacaaatgccctgcttccaggaaaagcctctaagcatcaggtaacatcaaatcgtaccccaaaccgacacaggtggtcaggtagagaataccaaggcgcttgagagaactcgggtgaaggaactaggcaaaatggtgccgtaacttcgggagaaggcacgctgatatgtaggtgaagcgacttgctcgtggagctgaaatcagtcgaagataccagctggctgcaactgtttattaaaaacacagcactgtgcaaacacgaaagtggacgtatacggtgtgacgcctgcccggtgccggaaggttaattgatggggtcagcgcaagcgaagctcttgatcgaagccccggtaaacggcggccgtaactataacggtcctaaggtagcgaaattccttgtcgggtaagttccgacctgcacgaatggcgtaatgatggccaggctgtctccacccgagactcagtgaaattgaactcgctgtgaagatgcagtgtacccgcggcaagacggaaagaccccgtgaacctttactatagcttgacactgaacattgagccttgatgtgtaggataggtgggaggctttgaagtgtggacgccagtctgcatggagccgaccttgaaataccaccctttaatgtttgatgttctaacgtggacccgtgatccgggttgcggacagtgtctggtgggtagtttgactggggcggtctcctcctaaagagtaacggaggagcacgaaggttggctaatcctggtcggacatcaggaggttagtgcaatggcataagccagcttgactgcgagcgtgacggcgcgagcaggtgcgaaagcaggtcatagtgatccggtggttctgaatggaagggccatcgctcaacggataaaaggtactccggggataacaggctgataccgcccaagagttcatatcgacggcggtgtttggcacctcgatgtcggctcatcacatcctggagctgaagtaggtcccaagggtatggctgttcgccatttaaagtggtacgcgagctgggtttagaacgtcgtgagacagttcggtccctatctgccgtgggcgctggagaactgaggggggctgctcctagtacgagaggaccggagtggacgcatcactggtgttcgggttgtcatgccaatggcactgcccggtagctaaatgcggaagagataagtgctgaaagcatctaagcacgaaacttgccccgagatgagttctccctgactccttgagagtcctgaaggaacgttgaagacgacgacgttgataggccgggtgtgtaagcgcagcgatgcgttgagctaaccggtactaatgaaccgtgaggcttaaccttacaacgccgaagctgttttggcggatgagagaagattttcagcctgatacagattaaatcagaacgcagaagcggtctgataaaacagaatttgcctggcggccgtagcgcggtggtcccacctgaccccatgccgaactcagaagtgaaacgccgtagcgccgatggtagtgtggggtctccccatgcgagagtagggaactgccaggcatcaaattaagcagtaagccggtcataaaaccggtggttgtaaaagaattcggtggagcggtagttcagtcggttagaatacctgcctgtcacgcagggggtcgcgggttcgagtcccgtccgttccgccaccctaattaggggcgtagttcaattggtagagcaccggtctccaaaaccgggtgttgggagttcgagtctctccgcccctgccagaaatcatccttagcgaaagctaaggattttttttatctgaaataaccctctccgaagtaaatccttctaccggcatccttgccagccattcatattaatacacttcatccagcacgttaattttcaaaagatcgcgaatcaacgcatttttatcgctattttgcagccatatggcataaagcggccgactaagtgttgtgctatcgacaacggtatgcaggccgccttttttacgcgcccagctgacgggtagccaggtgcaaccattaagcatcgcaatctgttgctgtgccagttcagcagaactggttgtcagaatgggcacttcgtcagcaccgatcaaacctgcctcatgctgttgaaaatctggcccccactcaagtcgcagataattaagatctccctttagtttactaggggcactggtataaagcgctaaagtgaaatatcccagcaactgactactaaattcgtccattttgggcgcttcagtggtaataagaagatcaagctggcgttcatgcagctgttttaccagagactgccgttgggcaattcgcgcttcgaactgtaagcctgtatgggcatcctgattttgatacaagcgtcccagccactgattaagcatacattcccacaagctggcgctggcaccgatagaaaactcgttatgtcgactggtatgcgccacctccttacgggcggcctgccaggtgctcatgagcgtttctgcataaggcagtagtttttcaccggcagcggttaaacggatattgtttctgtggcgggtgaaaaggttcacacccagttgattttccagttgtctgattcgaaagctcactgcactctgggtcagatagaggctttcagccgctcgaccaaagtgacgcgttcggctaacttccaggaaagtttttaacaattccgtatccacagtgctctccgcaaaattatttgtcgttatgatttaaatgttttgttttacactctgtcaagcgtaactaatactccgcgccataactagctcggtcaaagaattaggagcgtgcaggatggcggaaagctttacgacgactaatcgatatttcgacaataaacattatccacgtggattctctcgtcatggtgatttcaccatcaaagaggcacaactgcttgagcgtcatggttatgccttcaatgagttggatcttggcaaacgcgagccggttaccgaggaagagaaactcttcgtagcagtatgccgtggcgaacgtgagccagtgacagaagcagaacgcgtgtggtccaagtatatgacgcgtattaagcgtccaaaacgttttcacaccctttccggcggtaaaccgcaggttgaaggtgctgaagactacaccgattctgacgattaataaaaagggcgaaatgccctttttttatgtcagtagtttctgcagatggatgagcaaacggtcaatcgctcgatagctaactgcctcctgcaaatgctgacgtgtgataatgtcagactgatcaatatcagcaatggttcgtgcaactttcaataaccgctgccaggcacgaatgcttaaccccagatggatcagtgttccttccaaccacatcgcatcttcgctctcaagtttgcagaattggcgtatttccggactatccagccaggcattcagtttattctgccgcttaaattggcgctctctggcggccattacgcgttgtttaacggtggcgctgctttctcccggcactaccgttttactcaaaatgccggggggtggtaatgggatctccagactgagatcgaagcggtcgagaaagggcccgctgagccggttgagataacgtaatgtctgttctggcgtgcagcggttatggtttccctgataatgtccggtagggctgggattcatcgccgcaacaagctggaaacgggctggataggttatttttgctcgtgtgcgactaagatggatctgcccggattcaatcggctctcgcaaggcatccagtgtacgccgttcaaattcaggtagctcatcaagaaaaagcacgccgttatgcgccaggctaatttcaccgggccctggaattgcgccaccgcctaccatcgcagttaagcttgcactgtgatgaggactgcggaacgggcgctgccgccattgtttttgtacactttcagcatttaccagacttaatatcgcagcactctccagtgcctcttcattgcttaaatctggcaacaggccattaatacggctggcgagcattgttttacctgttcccggcggcccaatcagtaaaaggttgtgcccgccagcagcggtaatttccagtcctcgctttccttgttcctgaccgataacatcactgagatcatgttgtagcgcccgggatactgcatcagttggtttcgggcgttcgagagcgtgcttaccttccagaaacgcacagacagcttgcagatgatcggctatcaggcatccttcaccgttaattagccccacttcatcttcgttatctttcgcgacgataatttttctgccgctcttaatagcttcagttgcactggagattgcgccgggaacgccacgcagagcgcctgtaagcgccagttctccgactaattcatattcatctaacttattggctgtaagctgttcactggccgccagcaacgcaatggcgataggtaaatcatatcgtcccccttcttttggcagatcagctggagccaggttgatggtgatttttttcgccggatattcatatccgctattgataatggcgctgcgcacgcgatcgcgagcttcttttaccgttgtttctggtaagcccaccatcgttaagccgggtagacctttactgatatgtacctcaacagtgatcgggggcgcatttactcccagggctgcgcgggtatgaacaatactcagactcataagccctccttgagtcaccattatgtgcataagatatcgctgctgtagcccgctaattcgtgaattttagtggctgattcctgtttatttgtgcaagtgaagttgagttgttctggcggtggaatgatgctcgcaaaaatgcagcggacaaaggatgaactacgaggaagggaacaacattcatactgaaattgaatttttttcactcactattttatttttaaaaaacaacaatttatattgaaattattaaacgcatcataaaaatcggccaaaaaatatcttgtactatttacaaaacctatggtaactctttaggcattccttcgaacaagatgcaagaaaagacaaaatgacagcccttctacgagtgattagcctggtcgtgattagcgtggtggtgattattatcccaccgtgcggggctgcacttggacgaggaaaggcttaaagatcaagccttaacgaactaagacccccgcaccgaaaggtccgggggttttttttgaccttaaaaacataaccgaggagcagacaatgaataacagcacaaaattctgtttctcaagattcaggacggggaactaactatgaatggcgcacagtgggtggtacatgcgttgcgggcacagggtgtgaacaccgttttcggttatccgggtggcgcaattatgccggtttacgatgcattgtatgacggcggcgtggagcacttgctatgccgacatgagcagggtgcggcaatggcggctatcggttatgctcgtgctaccggcaaaactggcgtatgtatcgccacgtctggtccgggcgcaaccaacctgataaccgggcttgcggacgcactgttagattccatccctgttgttgccatcaccggtcaagtgtccgcaccgtttatcggcactgacgcatttcaggaagtggatgtcctgggattgtcgttagcctgtaccaagcacagctttctggtgcagtcgctggaagagttgccgcgcatcatggctgaagcattcgacgttgcctgctcaggtcgtcctggtccggttctggtcgatatcccaaaagatatccagttagccagcggtgacctggaaccgtggttcaccaccgttgaaaacgaagtgactttcccacatgccgaagttgagcaagcgcgccagatgctggcaaaagcgcaaaaaccgatgctgtacgttggcggtggcgtgggtatggcgcaggcagttccggctttgcgtgaatttctcgctgccacaaaaatgcctgccacctgtacgctgaaagggctgggcgcagtagaagcagattatccgtactatctgggcatgctggggatgcacggcaccaaagcggcaaacttcgcggtgcaggagtgtgacctgctgatcgccgtgggcgcacgttttgatgaccgggtgaccggcaaactgaacaccttcgcgccacacgccagtgttatccatatggatatcgacccggcagaaatgaacaagctgcgtcaggcacatgtggcattacaaggtgatttaaatgctctgttaccagcattacagcagccgttaaatcaatgactggcagcaacactgcgcgcagctgcgtgatgaacattcctggcgttacgaccatcccggtgacgctatctacgcgccgttgttgttaaaacaactgtcggatcgtaaacctgcggattgcgtcgtgaccacagatgtggggcagcaccagatgtgggctgcgcagcacatcgcccacactcgcccggaaaatttcatcacctccagcggtttaggtaccatgggttttggtttaccggcggcggttggcgcacaagtcgcgcgaccgaacgataccgttgtctgtatctccggtgacggctctttcatgatgaatgtgcaagagctgggcaccgtaaaacgcaagcagttaccgttgaaaatcgtcttactcgataaccaacggttagggatggttcgacaatggcagcaactgttttttcaggaacgatacagcgaaaccacccttactgataaccccgatttcctcatgttagccagcgccttcggcatccatggccaacacatcacccggaaagaccaggttgaagcggcactcgacaccatgctgaacagtgatgggccatacctgcttcatgtctcaatcgacgaacttgagaacgtctggccgctggtgccgcctggcgccagtaattcagaaatgttggagaaattatcatgatgcaacatcaggtcaatgtaagcgctcgcttcaatccagaaaccttagaacgtgttttacgcgtggtgcgtcatcgtggtttccacgtctgcagtatgaatatggccgccgccagcgatgcacaaaatataaatatcgaattgaccgttgccagcccacggagcgtcgacttactgtttagtcagttaaataaactggtggacgtcgcacacgttgccatctgccagagcacaaccacaagtcaacaaatccgcgcctgagcgcaaaaggaatataaaaatgaccacgaagaaagctgattacatttggttcaatggggagatggttcgctgggaagacgcgaaggtgcatgtgatgagccacgcgctgcactatggcactagcgtttttgaaggcatccgttgctacgacagccacaaaggaccggttgtattccgccatcgtgagcatatgcagcgtctgcatgactccgccaaaatctatcgcttcccggttagccagagcattgatgagctgatggaagcttgtcgtgacgtgatccgcaaaaacaatctcaccagcgcctatatccgtccgctgatcttcgtcggtgatgttggcatgggagtaaacccgccagcgggatacagtaccgacgtgattatcgctgctttcccgtggggagcgtatctgggcgcagaagcgctggagcaggggatcgatgcgatggtttcctcctggaaccgcgcagcaccaaacaccatcccgacggcggcaaaagccggtggtaactacctctcttccctgctggtgggtagcgaagcgcgccgccacggttatcaggaaggtatcgcgctggatgtgaacggttatatctctgaaggcgcaggcgaaaacctgtttgaagtgaaagatggtgtgctgttcaccccaccgttcacctcctccgcgctgccgggtattacccgtgatgccatcatcaaactggcgaaagagctgggaattgaagtacgtgagcaggtgctgagccgcgaatccctgtacctggcggatgaagtgtttatgtccggtacggcggcagaaatcacgccagtgcgcagcgtagacggtattcaggttggcgaaggccgttgtggcccggttaccaaacgcattcagcaagccttcttcggcctcttcactggcgaaaccgaagataaatggggctggttagatcaagttaatcaataaatacaaaaaatgggacggcacgcaccgtcccatttacgagacagacactgggagtaaataaagtatgcctaagtaccgttccgccaccaccactcatggtcgtaatatggcgggtgctcgtgcgctgtggcgcgccaccggaatgaccgacgccgatttcggtaagccgattatcgcggttgtgaacagcttcacccaatttgtaccgggtcacgtccatctgcgcgatctcggtaaactggtcgccgaacaaattgaagcggctggcggcgttgccaaagagttcaacaccattgcggtggatgatgggattgccatgggccacggggggatgctttatagtctgccatctcgcgaactgatcgctgattccgttgagtatatggtcaacgcccactgcgccgacgccatggtctgcatctctaactgcgacaaaatcaccccggggatgctgatggcttccctgcgcctgaatattccggtgatctttgtttccggcggcccgatggaggccgggaaaaccaaactttccgatcagatcatcaagctcgatctggttgatgcgatgatccagggcgcagacccgaaagtatctgactcccagagcgatcaggttgaacgttccgcgtgtccgacctgcggttcctgctccgggatgtttaccgctaacagtatgaactgcctgaccgaagcgctgggcctgagccagccgggcaacggcagcctgctggcaacccacgccgaccgtaagcagctgttccttaatgctggtaaacgcattgttgaattgaccaaacgttattacgagcaaaacgacgaaagtgcactgccgcgtaatatcgccagtaaggcggcgtttgaaaacgccatgacgctggatatcgcgatgggtggaagcactaacaccgtacttcacctgctggcggcggcgcaggaagcggaaatcgacttcaccatgagtgatatcgataagctttcccgcaaggttccacagctgtgtaaagttgcgccgagcacccagaaataccatatggaagatgttcaccgtgctggtggtgttatcggtattctcggcgaactggatcgcgcggggttactgaaccgtgatgtgaaaaacgtacttggcctgacgttgccgcaaacgctggaacaatacgacgttatgctgacccaggatgacgcggtaaaaaatatgttccgcgcaggtcctgcaggcattcgtaccacacaggcattcagccaagattgccgttgggatacgctggacgacgatcgcgccaatggctgtatccgcagcctggaacacgcctacagcaaagacggcggcctggcggtgctctacggtaactttgcggaaaacggctgcatcgtgaaaacggcaggcgtcgatgacagcatcctcaaattcaccggcccggcgaaagtgtacgaaagccaggacgatgcggtagaagcgattctcggcggtaaagttgtcgccggagatgtggtagtaattcgctatgaaggcccgaaaggcggtccggggatgcaggaaatgctctacccaaccagcttcctgaaaagtatgggtctcggcaaagcctgtgcgctgatcaccgacggtcgtttctctggtggcacctctggtctttccatcggccacgtcagtccggaagcggcaagcggcggcagcattggcctgattgaagatggtgacctgatcgctatcgacatcccgaaccgtggcattcagttacaggtaagcgatgccgaactggcggcgcgtcgtgaagcgcaggacgctcgaggtgacaaagcctggacgccgaaaaatcgtgaacgtcaggtctcctttgccctgcgtgcttatgccagcctggcaaccagcgccgacaaaggcgcggtgcgcgataaaagcaaactggggggttaataatggctgacagccaacccctgtccggtgctccggaaggtgccgaatatttaagagcagtgctgcgcgcgccggtttacgaggcggcgcaggttacgccgctacaaaaaatggaaaaactgagcagccgtcttgataacgtcattctggtgaagcgcgaagatcgccagccagtgcacagctttaagctgcgcggcgcatacgccatgatggcgggcctgacggaagaacagaaagcgcacggcgtgatcactgcttctgcgggtaaccacgcgcagggcgtcgcgttttcttctgcgcggttaggcgtgaaggccctgatcgttatgccaaccgccaccgccgacatcaaagtcgacgcggtgcgcggcttcggcggcgaagtgctgctccacggcgcgaactttgatgaagcgaaagccaaagcgatcgaactgagtcagcagcaggggttcacctgggtgccgccgttcgaccatccgatggtgattgccgggcaaggcacgctggcgctggaactgctccagcaggacgcccatctcgaccgcgtatttgtgccagtcggcggcggcggtctggctgctggcgtggcggtgctgatcaaacaactgatgccgcaaatcaaagtgatcgccgtagaagcggaagactccgcctgcctgaaagcagcgctggatgcgggtcatccggttgatctgccgcgcgtagggctatttgctgaaggcgtagcggtaaaacgcatcggtgacgaaaccttccgtttatgccaggagtatctcgacgacatcatcaccgtcgatagcgatgcgatctgtgcggcgatgaaggatttattcgaagatgtgcgcgcggtggcggaaccctctggcgcgctggcgctggcgggaatgaaaaaatatatcgccctgcacaacattcgcggcgaacggctggcgcatattctttccggtgccaacgtgaacttccacggcctgcgctacgtcagtgaacgctgcgaactgggcgaacagcgtgaagcgttgttggcggtgaccattccggaagaaaaaggcagcttcctcaaattctgccaactgcttggcgggcgtagcgtcaccgagttcaactaccgttttgccgatgccaaaaacgcctgcatctttgtcggtgtgcgcctgagccgcggcctcgaagagcgcaaagaaattttgcagatgctcaacgacggcggctacagcgtggttgatctctccgacgacgaaatggcgaagctacacgtgcgctatatggtcggcggacgtccaagccatccgttgcaggaacgcctctacagcttcgaattcccggaaagtccgggcgcgctgctgcgcttcctcaacacgctgggtacgtactggaacatttctttgttccactatcgcagccatggcaccgactacgggcgcgtactggcggcgttcgaacttggcgaccatgaaccggatttcgaaacccggctgaatgagctgggctacgattgccacgacgaaaccaataacccggcgttcaggttctttttggcgggttaaggaaaaatgcctgatagcgcttcgcttatcaggcctacccgcgcgacaacgtcatttgtggttcggcaaaatcttccagaatgcctcaattagcggctcatgtagccgctttttctgcgcacacacgcccagctcaaacggcgttttctcatcgctgcgctctaaaatcatcacgcggttacgcaccggttcggggctgttttccagcaccacttccggcaacaatgccacgccacagccgagtgccaccatgcttaccatcgcttcatgcccgccaaccgtggcgtaaatcatcgggttactgattttattgcgtcgaaaccacagttcaatgcggcggcgtaccggcccctgatcggccataataaacggcaccgtactccagtccggcttctctacgctcacctgattacgcaccgggcagggcagcgcgggggcaatcagcactactgccagattctccagcatgctaaacgccactgcgccgggcaaggtttccggtttacccgcaatcgccagatccgcttcaccagtgaccaccttttccatcgcatctgccgcatcaccagtagtaagtttaatctccacgctcgggtgttccgcgcggaagcgatccagaatcggcggcagatggctgtaggcagcggtcacgctgcagaagatatgtaattcgccagagaggctcggcccttgctgatcgatggtgtggcgcaactgctgatactgcaacagcgtttgctgggcgaaaacgcgcagctcttcgcccgcttcagtcagcgtcaccgtgcggttatcgcgcacaaacagcggctgaccgagatcttcttccaggcgctgaatctgccgactgagcgtggatgggctaacgtgcatcgcccgcgcgctgcggccaaaatggcggctttccgccagatgcaggaaggttttcagatcgcgtaaatccacagggacagccctcgatgttgacgttgcaaaaattgcaatgtgacgttgtgaatatatcaatttccgcaataaatttcctgtcatatagtgaattcaatctcgcaaacgcgaaccgaacaataagaagcacaacatcacgaggaatcaccatggctaactacttcaatacactgaatctgcgccagcagctggcacagctgggcaaatgtcgctttatgggccgcgatgaattcgccgatggcgcgagctaccttcagggtaaaaaagtagtcatcgtcggctgtggcgcacagggtctgaaccagggcctgaacatgcgtgattctggtctcgatatctcctacgctctgcgtaaagaagcgattgccgagaagcgcgcgtcctggcgtaaagcgaccgaaaatggttttaaagtgggtacttacgaagaactgatcccacaggcggatctggtgattaacctgacgccggacaagcagcactctgatgtagtgcgcaccgtacagccactgatgaaagacggcgcggcgctgggctacagccacggtttcaacatcgtcgaagtgggcgagcagatccgtaaagatatcaccgtagtgatggttgcgccgaaatgcccaggcaccgaagtgcgtgaagagtacaaacgtgggttcggcgtaccgacgctgattgccgttcacccggaaaacgatccgaaaggcgaaggcatggcgattgccaaagcctgggcggctgcaaccggtggtcaccgtgcgggtgtgctggaaagctccttcgttgcggaagtgaaatctgacctgatgggcgagcaaaccatcctgtgcggtatgttgcaggctggctctctgctgtgcttcgacaagctggtggaagaaggtaccgatccagcatacgcagaaaaactgattcagttcggttgggaaaccatcaccgaagcactgaaacagggcggcatcaccctgatgatggaccgtctctctaacccggcgaaactgcgtgcttatgcgctttctgaacagctgaaagagatcatggcacccctgttccagaaacatatggacgacatcatctccggcgaattctcttccggtatgatggcggactgggccaacgatgataagaaactgctgacctggcgtgaagagaccggcaaaaccgcgtttgaaaccgcgccgcagtatgaaggcaaaatcggcgagcaggagtacttcgataaaggcgtactgatgattgcgatggtgaaagcgggcgttgaactggcgttcgaaaccatggtcgattccggcatcattgaagagtctgcatattatgaaagtctgcacgagctgccgctgattgccaacaccatcgcccgtaagcgtctgtacgaaatgaacgtggttatctctgataccgctgagtacggtaactatctgttctcttacgcttgtgtgccgttgctgaaaccgtttatggcagagctgcaaccgggcgacctgggtaaagctattccggaaggcgcggtagataacgggcaactgcgtgatgtgaacgaagcgattcgcagccatgcgattgagcaggtaggtaagaaactgcgcggctatatgacagatatgaaacgtattgctgttgcgggttaagtgcgcgctgatgccctcaccccgaccctctcccacagggagagggagaaaacactcaaggccttctcctggagaaggccttgctattagttgcggtacagcaccttaatgatgtgatatccgaactgggtgtgcagcgggccggtcggctccagtaccggacaagagaaaaccactttatcgaacgccggaaccatctgaccctggcggaattcacctaaatcaccgccgcgtttgccacttgggcaaatggagtgtttcttcgccagcttgccgaaatcggccccgttcttaatctgctcgagaagatccagagccagtttctcttcttttacaaggatatgcagtgctgctgctgtttttgccatgatcgtgccttgagtgaataattgtcaggcggcgattttagcatgatccgcagatgctaacgtaattgtcagtcagggagtggctggtacatatatggcaaaagcccggaaaatccgggcttcgcaggtccctcaaggggagaaaacttagggcctctatgggctacaaagtcattatcggggatggttattttattgtcaatttatgaggcttatggcattgatactcttgatgaccgccctctgtatgtctgcaaccaactcatgtggcaaacattgattaagataccctctgtaagtccttgctctgtttaatctgtttcgactgacttgttgtaccaggtcggctttggcccaacgaatctgctgatcaaagaattgcaggtcattgataacattactggctatttcaacatgcattccacgttttaacttgtctggtcggctgtggttgataatggaacgacgatgcatgcgttgccattaatttttccgttgagcacgacaactaacctgttttttatcatttcaggaggaatgcggccatcgtaatacgtcgtgctgaacggtccattttggctaacaggatagttaccaaagttgcattccagtatttcaccaaccttagggctgaaattaatcgccacgagtaaacctctccttagtaaactctgaaaaagtaataacacaacgttacgacccgatattttctaagtctaatggattcacgatgaactccgatttcggtcttctctctctgatttaaacatccgcagccaaccggttagcggcttacacgcggtcacattcaaatgcgattctgctacaatcctccccccgttcgaagattgagcaatacacctatgcgtctaaaccccggccaacaacaagctgtcgaattcgttaccggcccctgcctggtgctggcgggcgcgggttccggtaaaactcgtgttatcaccaataaaatcgcccatctgatccgcggttgcggttatcaggcgcggcacattgcggcggtgacctttactaataaagcagcgcgcgagatgaaagagcgtgtagggcagacgctggggcgcaaagaggcgcgtgggctgatgatctccactttccatacgttggggctggatatcatcaaacgcgagtatgcggcgcttgggatgaaagcgaacttcagcttgtttgacgataccgatcagcttgctttgcttaaagagttgaccgaggggctgattgaagatgacaaagttctcctgcaacaactgattagcaccatctctaactggaagaatgatctcaaaacaccgtcccaggcggcagcaagtgcgattggcgagcgggaccgtatttttgcccattgttatgggctgtatgatgcacacctgaaagcctgtaacgttctcgacttcgatgatctgattttattgccgacgttgctgctgcaacgcaatgaagaagtccgcaagcgctggcagaacaaaattcgctatctgctggtggatgagtatcaggacaccaacaccagccagtatgagctggtgaaactgctggtgggcagccgcgcgcgctttaccgtggtgggtgacgatgaccagagcatctactcctggcgcggtgcacgtccgcaaaacctggtgctgctgagtcaggattttccggcgctgaaggtgattaagcttgagcagaactatcgctcttccgggcgtattctgaaagcggcgaacatcctgatcgccaataacccgcacgtctttgaaaagcgtctgttctccgaactgggttatggcgcggagctaaaagtattaagcgcgaataacgaagaacatgaggctgagcgcgttactggcgagctgatcgcccatcacttcgtcaataaaacgcagtacaaagattacgccattctttatcgcggtaaccatcagagccgggtgtttgaaaaattcctgatgcaaaaccgcatcccgtacaaaatatctggtggtacgagctttttctctcgtcctgaaatcaaggacttgctggcttatctgcgcgtgctgactaacccggacgatgacagcgcatttctgcgtatcgttaacacgccgaagcgagagattggcccggctacgctgaaaaagctgggtgagtgggcgatgacgcgcaataaaagcatgtttaccgccagctttgatatgggcctgagtcagacgcttagcggacgtggttatgaagcattgacccgcttcactcactggttggcagaaatccagcgtctggcggagcgggagccgattgccgcggtgcgtgatctgatccatggcatggattatgaatcctggctgtacgaaacaagccccagcccgaaagccgccgaaatgcgcatgaagaacgtcaaccaactgtttagctggatgacggagatgctggaaggcagtgaactggatgagccgatgacgctcacccaggtggtgacgcgctttactttgcgcgacatgatggagcgtggtgagagtgaagaagagctggatcaggtgcaactgatgactctccacgcgagcaaagggctggagtttccttatgtctacatggtcggtatggaagaagggtttttgccgcaccagagcagcatcgatgaagataatatcgatgaggagcggcggctggcctatgtcggcattacccgcgcccagaaggaattgacctttacgctgtgtaaagaacgccgtcagtacggcgaactggtgcgcccggagccgagccgctttttgctggagctgccgcaggatgatctgatttgggaacaggagcgcaaagtggtcagcgccgaagaacggatgcagaaagggcaaagccatctggcgaatctgaaagcgatgatggcggcaaaacgagggaaataatcaaggccggaaaagatgcgtcagcatcgcatccggcacttactcattaatgcacttccagcggccagtggacatagctctgccactggctttcctgagcaataatctctttacccagcggatgttgggttagccaaccttgcggaagcgtcaaggtcaacagttcatggttagcctgtaatgtcatctctggcacgagatcgtcacggcgacggctggcaaaaatgatggccaggcgtagtaaacggcagagttgttctgcgacgcgcggcggtacggcattttgctgatgcaggctactgagatcgaccggattagtctggttgagcagtagcgtcgccagcaattttttctgtgcgggggtaaaaccgggaagatccagattacgcaccagataagcagcgtgttgcggcgcttgtttgaagtcaacgctcaggccgatttcatgaagctgacaggcgctgatgagcaaatcgcggcttattgcttcaagatgccattcgttttccacctgatcgaagaagttagccgcaactttggctacgcgctgtgcctgatcaatatcgatcataaagcggcgttgaatattacgcagcgtacggctgcgaatatcctgctcgacggccagatgcaacatgccgtagaccaggccttcacgcagcgcaccgcccgccagggtcatacactgaatattcagttcggtaaaaatggcgatcaggatcgccagaccactcgggaacactaacgcacgttccagcgtcagcccgtcaatctccagttcctccagccgaccgcaatgaatggctcgctgtttcaattgctgcaacttttccagggtaatgcgttcatccatcccctgtgccatcatgatttcctgtaacgcctgcacggtgccggaagcaccaacgcacactttccagccgtgataccgtaattcatcggcaaccggacgtaacacttcgcgtgccgctttttctgcagcatcaaaattttcctgccccagattacgatcggcaaaatagcgttccagccaggtgacgcagcccatgctcaggctgaacaagctggtggtttgtgcacccgtgccggttaccagttcagtactggctccgcctatatccaccaccaggcgctgatcggcaccaccagtggtgtgagcaacgccctgataaatcagacgtgcttcctcttcaccgctgatcacctgtaccggacaaccgagaatttcctgcgctttggcaataaaatcacccgcattgacggcaaggcgtaacgtcgccgtagcgacaacgcgaatttggctgggaggaatatcttgcagacgttcagcaaacaggcgcaaacattgccaaccgcgctccattgcttcattggagagggcattttcgctattcaggccagcagccagacgcactttgcgttttattcgcgtcagcgtctggatgcttccagccacctcgcgcacaaccagcatatgaaaactattgctaccgagatcaatggctgcatacaggctgctggtggaacccatactcttcatccttcaatctgtctctgtgttggctgcattctttcacctgaatcacttactacagtaagctcatcgggattcattctcttgccatcttgatacagtttgaatgattttgagtatgacattttttatttaaccactacgacgacgattacgcggagcgccagtacgacgcggaccattgcctgtgcgcgggcgcgtgaggcgcagcggttttggcagatcggtcatcaatgcgtccggattgtatttgcttaccggaatactgtgaccaatataggtctcaatagcaggcaaattcaatgcatactcttcacacgccaggctgatagagtgaccgcttgcgcctgcgcgacctgtacgaccaatacggtgaacgtaatcttcacagtcatcgggtaaatcgtagttaaagacgtgcgtcactgccggaatatgcaaaccacgcgcggcaacgtcggtggcaaccagaatatccagatcgccacgggtaaattcatcaagaatacgcagacgttttttctgcgcgacatcgcctgtcaataaaccgacacgatgaccatctgctgccaggtggccccagatctcttcacaacggtgtttggtgttggcgaaaataatcgctctgtctggccactcttcttcgatcagcgtttgcagcaaacgcattttttcttcgttagaagggtagaaaagctcttctttaatacggtggcccgttttctgttccggttccacttcaatatattcggcattgttcatctgctcgaacgccagttcacgtacccggtagctaagcgtggcggagaacagcatgttgaggcgctggtttgcaggcggcatacggcggaacagccagcggatatctttaataaagcccagatcgtacatgcgatcggcttcgtccagtaccaccacctgaatggcaccgaggttaatgtggttctgcttggcgtagtcaattaaacgccccgtggtgccaatcagaatgtcaacgccgctttccagcactttcagctgtttgtcgtagccatcaccaccgtaagccagacccagcttcaggccagtagcttccgccagcggttctgcgtcggcatggatctgcacggcaagttcacgcgtcggtgccataattaaggcacgcggctgattcaccttgcgatcggcaatcgcaggatgagagagaagataatgaaacgtactcgtaagaaacgccatcgttttcccggtaccggtttgcgcctgcccggctacgtcacgacccgccagcgtcagcggaagggccagtgcctgaatgggcgtacagttatgaaacccttttttttcaagggcttctacaaccttcggatgcagggcgaagtcggaaaacttctgttctgttaaatgtgttttgctcatagtgtggtagaatatcagcttactattgctttacgaaagcgtatccggtgaaataaagtcaacctttagttggttaatgttacaccaacaacgaaaccaacacgccaggcttattcctgtggagttatatatgagcgataaaattattcacctgactgacgacagttttgacacggatgtactcaaagcggacggggcgatcctcgtcgatttctgggcagagtggtgcggtccgtgcaaaatgatcgccccgattctggatgaaatcgctgacgaatatcagggcaaactgaccgttgcaaaactgaacatcgatcaaaaccctggcactgcgccgaaatatggcatccgtggtatcccgactctgctgctgttcaaaaacggtgaagtggcggcaaccaaagtgggtgcactgtctaaaggtcagttgaaagagttcctcgacgctaacctggcgtaagggaatttcatgttcgggtgccccgtcgctaaaaactggacgcccggcgtgagtcatgctaacttagtgttgacttcgtattaaacataccttattaagtttgaatcttgtaatttccaacgcttcccgttttatcttaaatgcgaagtgaacagatttctggcagcagtctcaatccgtcttgtcgtttcagttctgcgtactctcctgtgaccaggcagcgaaaagacatgagtcgatgaccgtaaacaggcatggatgatcctgccataccattcacaacattaagttcgagatttaccccaagtttaagaactcacaccactatgaatcttaccgaattaaagaatacgccggtttctgagctgatcactctcggcgaaaatatggggctggaaaacctggctcgtatgcgtaagcaggacattatttttgccatcctgaagcagcacgcaaagagtggcgaagatatctttggtgatggcgtactggagatattgcaggatggatttggtttcctccgttccgcagacagctcctacctcgccggtcctgatgacatctacgtttcccctagccaaatccgccgtttcaacctccgcactggtgataccatctctggtaagattcgcccgccgaaagaaggtgaacgctattttgcgctgctgaaagttaacgaagttaacttcgacaaacctgaaaacgcccgcaacaaaatcctctttgagaacttaaccccgctgcacgcaaactctcgtctgcgtatggaacgtggtaacggttctactgaagatttaactgctcgcgtactggatctggcaagtcctatcggtcgtggtcagcgtggtctgattgtggcaccgccgaaagccggtaaaaccatgctgctgcagaacattgctcagagcattgcttacaaccacccggattgtgtgctgatggttctgctgatcgacgaacgtccggaagaagtaaccgagatgcagcgtctggtaaaaggtgaagttgttgcttctacctttgacgaacccgcatctcgccacgttcaggttgcggaaatggtgatcgagaaggccaaacgcctggttgagcacaagaaagacgttatcattctgctcgactccatcactcgtctggcgcgcgcttacaacaccgttgttccggcgagtggtaaagtgttgaccggtggtgtggatgccaacgccctgcatcgtccgaaacgcttctttggtgcggcgcgtaacgtggaagagggcggcagcctgaccattatcgcgacggcgcttatcgataccggttctaaaatggacgaagttatctacgaagagtttaaaggtacaggcaacatggaactgcacctctctcgtaagatcgctgaaaaacgcgtcttcccggctatcgactacaaccgttctggtacccgtaaagaagagctgctcacgactcaggaagaactgcagaaaatgtggatcctgcgcaaaatcattcacccgatgggcgaaatcgatgcaatggaattcctcattaataaactggcaatgaccaagaccaatgacgatttcttcgaaatgatgaaacgcagttaaatttgtcttatgccaaaaacgccacgtgtttacgtggcgttttgcttttatatctgtaatcttaatgccgcgctggcgatgttaggaaaattcctggaatttgctggcatgttatgcaatttgcatatcaaatggttaatttttgcacaggactggtgggtttggaacggactttcccttctgaataaaggtcttcgtggttatacttctgctaataattttctctgagagcatgcattgtgaatttactgacagtgagtactgatctcatcagtatttttttattcacgacactgtttctgttttttgcccgtaaggtggcaaaaaaagtcggtttagtggataaaccaaacttccgcaaacgtcaccagggattgatacctctcgttggggggattagcgtttacgcagggatttgcttcacgttcggaattgtcgattactatattccgcatgcatctctctatctcgcttgtgccggtgtgcttgttttcattggcgcgctggatgaccgttttgatatcagcgtaaaaatccgtgccaccatacaggccgctgttggcattgttatgatggtgttcggcaagctttatctcagtagcctgggttatatctttggctcctgggagatggtgctcggaccgtttggttacttcctgacgctatttgccgtctgggcggccattaatgcgttcaacatggttgatggcattgatggcttgctgggcgggttgtcctgcgtcagctttgcagcaatcggtatgattttgtggttcgacgggcaaaccagcctcgcaatctggtgctttgcgatgatcgccgccatcctgccatacatcatgcttaaccttggtatcctgggtcgccgctacaaagtctttatgggtgatgcgggcagtacgctgattggttttaccgttatctggatcctgctcgaaacgacccagggcaaaacccatcccatcagcccggttaccgctttgtggataatcgccattccgctaatggatatggtggcgattatgtaccgtcgcctgcgtaaaggcatgagcccattctctcctgaccgtcagcatattcaccatttgatcatgcgtgccgggtttacttcccgtcaggcgtttgtgctgattacccttgccgcagcactgctcgcttccattggcgtgctggcagaatattctcattttgtcccggagtgggtcatgctggtgctctttttgctagcattcttcctctatggatattgcattaagcgtgcctggaaagttgctcgctttattaagcgcgtaaaacgcagactgcgtagaaatcgtggtggcagccccaatttaaccaaataaatgaggatgtgatgacacaaccaatgcctgggaaaccggccgaagacgctgaaaatgaactggatattcgtgggttgtttcgtaccttgtgggctgggaagctatggattattggcatggggctggcgtttgcgttaatcgcgctggcgtatacgttttttgctcgtcaggagtggagcagcacggcgattaccgatcgtccaacggtgaatatgctggggggatattacagccagcagcaatttttgcgtaacctggatgtccgtagtaacatggcttctgccgaccaaccaagcgtcatggacgaagcctataaagagtttgttatgcaactggccagctgggatacccgcagagagttctggctgcaaaccgactattacaaacagcggatggtgggcaacagcaaagccgatgcggcgttgctggatgaaatgattaacaacatccagtttatccccggagactttacccgcgcggtcaatgacagcgtgaagcttattgccgaaaccgcgcctgacgctaataacctgttacgtcagtatgttgcttttgccagccagcgtgcagccagccatctgaatgatgagctgaaaggcgcatgggcggcgcgtaccatccagatgaaagctcaggtgaagcgtcaggaagaggtggcgaaagccatctacgaccgccggatgaacagcattgagcaggcgctgaaaattgctgagcagcataatattagccgcagtgcgacagatgtacctgccgaggaattacctgatagtgaaatgttcctgcttgggcgtccaatgcttcaggctcgactggaaaatttacaggccgtcggtccggcctttgatctcgactatgatcagaatcgggccatgttaaacaccctgaatgttggtccaaccctggatccgcgttttcagacctatcgctatttgcgtacgccggaagaaccggtaaaacgcgatagcccacgtcgtgccttcctgatgattatgtggggcattgtcggggggctgatcggggctggtgtcgcattaacccgccgttgcagcaaataacaacactgctgcggtgagcgcaaaggcgctcgccgcttattcgaagagaatcgatgtgaaagtactgactgtatttggtacgcgcccggaagccatcaagatggcgccgttggtgcatgcgttggcaaaagatcctttttttgaggctaaagtttgcgtcactgcgcagcatcgggagatgctcgatcaggtgctgaaactcttttccattgtacctgactacgatctcaacataatgcagccaggacagggcctgacagagataacctgtcggattctggaagggctaaaacctattcttgccgagttcaaaccagacgtcgtgctggttcacggcgatacgacgacgacgctggcaaccagcctggcggcgttttatcagcgtattcctgttggtcacgttgaggctggtctgcgcacgggcgatctctatagcccgtggccggaagaggctaaccgtacattgaccgggcatctggcgatgtatcacttctctccaaccgaaacttcccggcaaaacttgctgcgtgaaaacgttgcggatagccgaatcttcattaccggtaatacagtcattgatgcactgttatgggtgcgtgaccaggtgatgagcagcgacaagctgcgtagtgaactggcggcaaattacccgtttatcgaccccgataaaaagatgattctggtgaccggtcacaggcgtgagagtttcggtcgtggctttgaagaaatctgccacgcgctggcagacatcgccaccacgcaccaggacatccagattgtctatccggtgcatctcaacccgaacgtcagagaaccggtcaatcgcattctggggcatgtgaaaaatgtcattctgatcgatccccaggagtatttaccgtttgtctggctgatgaaccacgcctggctgattttgaccgacagtggcggcattcaggaagaagcgcctagcctggggaaacctgtgctggtgatgcgcgataccactgagcgtccggaagcggtgacggcgggtacggtgcgtctggtaggcacggataagcagcgaattgtcgaggaagtgacgcgtcttttaaaagacgaaaacgaatatcaagctatgagccgcgcccataacccgtatggtgatggtcaggcatgctctcgcattctggaagcgttaaaaaataatcggataagtctatgagttttgcgaccatttctgttatcggactgggttatatcgggctgccaacggcagcagcgtttgccagtcggcaaaaacaggtaattggtgtcgatatcaaccaacatgcggttgataccatcaatcgtggcgaaatccatatcgtcgaacctgatttggcgagtgtagtaaaaactgccgtagaaggcggttttttacgagcgagcacgacgccagttgaagcggatgcctggctgattgctgtacccacgccgtttaagggcgatcatgagccagatatgacctacgttgaaagcgctgctcgctccattgcgccagtgctgaaaaaaggcgcgctggtgatccttgaatccaccagcccggtggggagtaccgagaagatggcagaatggttagcagagatgcgtccggatctcactttcccgcagcaggtgggcgagcaggcggacgtcaacattgcttactgcccggaacgcgtgttaccaggacaggtaatggtcgagctgattaaaaacgatcgcgtgattggtggtatgacgccggtttgtagcgcccgcgccagcgaactgtacaaaattttcctcgaaggtgagtgtgtcgtcactaacagccggacggcggaaatgtgtaagctcaccgaaaacagcttccgcgatgtgaatatcgcttttgctaatgaattgagcctgatttgtgccgatcaggggattaacgtctgggaactgattcgcctggcgaatcgtcaccctcgcgttaatattcttcagcctggccctggcgtgggcggtcactgcattgctgttgatccgtggtttatcgtggcacagaacccccagcaggcgcggcttatccgtaccgcgcgcgaagtgaacgatcacaaaccgttctgggttatcgatcaggtgaaagcggcggtggctgattgcctggcggctaccgataaacgcgccagtgaactgaaaatcgcctgctttggtctggcgtttaaaccgaatattgatgacctgcgcgaaagcccggcgatggaaatcgctgaactgatcgcccagtggcatagcggcgaaactctggttgttgagcctaacatccaccagttgccgaaaaaactgaccgggctttgtactctggcgcagcttgacgaggcgctggcaacggcagacgtgctggtgatgctggtcgatcatagtcagttcaaagttatcaatggcgacaatgtccatcagcagtatgtcgtcgatgccaaaggagtctggcgctgatgagaaaaattctgataacaggtggtgccgggtttattggcagcgcgctggtgcgttatatcatcaacgaaacgagcgacgcggtggtagtggtcgataagctgacctacgccggaaacctgatgagcctggcaccggtcgcgcaaagcgagcgctttgcctttgagaaagttgatatctgcgatcgggcagaactggcacgcgtattcactgagcatcagccagactgtgtcatgcatctggcagccgaaagccatgttgaccgttctattgacggcccggcagcgtttattgaaaccaacattgtcgggacttatacattgcttgaagcggcgcgggcttactggaatgcgctgacggaagataaaaaaagtgcgttccgttttcatcatatctccactgacgaagtatatggtgacctgcacagcacggatgatttcttcaccgaaaccacgccgtatgcgccgagcagcccttattccgcgagtaaagccagcagcgaccatctggtgcgcgcctggctgcggacctatggtctgccgacgcttatcaccaactgcagcaataactacggcccttaccactttccggaaaaactgatcccgctgatgatcctcaacgcgctggcgggtaaaagcctgccggtatatggcaacgggcagcaaatccgtgactggctgtatgtggaagatcacgcccgcgcgctgtattgcgtggcgaccaccgggaaagtcggtgaaacctataatattggtggtcacaacgagcgtaagaatctcgatgttgtggaaaccatttgcgagctgctggaagaactggctccgaacaagccgcacggcgtggcgcactatcgtgacctgatcacctttgtcgctgaccgtccggggcatgatctgcgttatgccattgatgctagcaaaattgcccgtgaacttggctggctgccgcaggaaacctttgaaagtggaatgcgtaaaacggttcagtggtatctggctaatgaaagctggtggaagcaggtgcaggacggcagctatcagggcgagcgtttaggtctgaaaggctaattttcagcggaggcaaacatgaaaggtattatcctggcgggcggttccggcacccgattgcatccgattacgcgcggcgtaagcaagcaactgttgccgatttacgataagccaatgatttactatccgctgagcgtgctgatgctggccggtatccgcgaaattctcatcatcactacgccggaagataaaggttatttccagcgcctgctgggcgatggtagtgagttcggtatccagctggaatatgccgaacagcccagcccggacggtctggcgcaggcctttatcatcggtgaaaccttccttaatggtgaaccttcttgtctggtgctgggcgataacatcttcttcggtcagggcttcagtccgaagctgcgtcatgttgcggcgcgcaccgaaggggcgacggtttttggctatcaggtgatggacccggaacgctttggcgtggtggagtttgacgacaatttccgcgctatcagcctggaagaaaagccaaaacagccgaagagtaactgggcggtgaccgggctttatttctacgacagtaaagtcgtggagtacgcaaagcaggtgaagccgagcgagcgtggtgaactggagattacctccatcaaccagatgtacctcgaggcgggcaacctgaccgttgaactgctcgggcgcggatttgcctggctggataccggcactcacgacagcctgattgaagccagcacctttgtacagacggtggaaaaacgccagggctttaagattgcctgcctggaagagattgcctggcgtaacggctggctcgatgacgagggtgtgaagcgtgctgccagtagtttagcgaaaactggctacggccaatatctgctggagttacttcgtgcccgtccgcgccagtattgagccactaacctgggaaaacgccttctttggtgttaacagcgccatcgtgcgcattacgtctgaagcaccgctcctgacgccagacgcgttagcgccgtggtcacgggtgcaggccaaaattgcggcaagtaatacgggtgaactggatgccctgcaacagctgggattctccctggtagaaggtgaagttgatttggcgctacccgtgaacaatgccagtgatagcggtgctgtagtggcacaagagaccgatattcccgcattacgtcagttagccagcgccgcatttgcgcaaagccgttttcgtgcgccgtggtatgcgcctgacgccagcagtcgcttttatgcacagtggattgaaaatgccgtgcgcggcacctttgatcatcaatgtctgattttacgtgcggcgtccggcgatattcgcggctatgtctctttacgggaactcaatgcgacagatgcgcgaattggcctgctggctggacgcggtgcaggtgctgagctgatgcaaacggcgctaaactgggcgtatgctcgcggtaaaacaactttgcgggtggcgacccaaatgggcaacaccgccgcgcttaaacgatacatacaaagtggtgcgaatgtagaaagcaccgcgtactggttatacaggtgatcacatgattccatttaacgcaccgccggtggtgggaaccgaactcgactatatgcagagcgcaatgggtagcggcaaactgtgtggcgatggcggttttacccgtcgctgccagcagtggctggagcaacgttttggcagcgccaaagtgttactgacgccgtcctgcaccgctagcctggagatggcggcgctgctgctcgatatccagcctggcgatgaagtgatcatgccgagctacacctttgtctccaccgccaatgcctttgtgctgcgtggcgcaaaaatcgtttttgtggatgttcgcccggacaccatgaacatcgacgaaacgctgattgaagcggcgatcaccgacaaaacgcgcgttatcgtgccggtccattacgcgggtgtggcctgcgaaatggacaccattatggcgttggcgaaaaagcataatttgtttgtggtagaagatgccgctcagggcgtgatgtccacttacaaagggcgtgcactgggaaccattggtcatattggctgctttagcttccatgaaaccaaaaactacacggcgggcggtgaaggcggcgcgacgctgattaacgataaagcgttaatcgaacgagccgagatcatccgtgaaaagggcactaaccgcagccagttcttccgtggtcaggtcgataaatatacctggcgcgatattggctccagctatttgatgtccgatctgcaagctgcatacctgtgggcgcaactggaagcagcggatcgtatcaaccagcaacgtctggcgctgtggcaaaactactacgatgcgttagcgcctctggcgaaagccgggcgtatcgagctgccgagcattcccgatggctgcgtgcagaacgcgcatatgttctacattaaactgcgggatattgatgaccggagcgcgttgattaactttctgaaagaagcggaaatcatggcggtgtttcattacattccgctgcacggttgccctgcgggggaacactttggtgagttccacggtgaagatcgctacaccaccaaagagagcgagcgcctgctgcgcctgccgctgttctacaacctgagccccgtcaatcagcgtacggtaattgcgactttgttgaactacttttcctgatatgagcttggcaaaagcgtccttgtggacggcggccagtacactggtcaagattggtgccgggttactggtcggtaagttgctggcggtgagttttggtccggcggggcttgggctggcggcaaatttccgccagttgattaccgtgctcggcgtgcttgccggggctggcatctttaacggtgtaaccaaatacgttgcccagtaccatgataatccgcaacagctgcgccgcgtggtcggcactagtagtgcgatggtacttggtttctctacgctgatggcgctggtttttgtgctggcagctgcgccaatcagccagggattgtttggtaataccgactatcaggggctggtgcgtttagtggcgctggtgcaaatggggatcgcctggggcaacctgttactggcgctgatgaaaggctttcgcgatgccgcaggtaatgcgttaagcctgattgtcggcagcttgattggcgttctcgcgtactacgtcagttaccgtttgggcggttatgaaggggcgttgctgggtctggcgctgattcccgcgctggtggtaattcctgccgccatcatgttgatcaaacgtggtgtcatcccgttaagctatctgaaacccagctgggataacggtctggcagggcagttgagcaaatttacgctcatggcgttgattacgagcgtgaccttgcctgttgcttacatcatgatgcgtaaactgctggcggcgcagtatagctgggatgaggtggggatctggcaaggggtgagcagtatttccgatgcctacctgcaatttattacggcaagcttcagcgtatatttgctgcccacgttgagccggctaacggaaaagcgcgatatcacccgggaagtggttaaaagcctgaaattcgtcttaccggcagtggcggcggcgagttttaccgtctggctgctgcgtgattttgctatctggctgctgttgagcaataaatttaccgctatgcgcgatctctttgcctggcagttagtgggtgatgtgttaaaagtgggcgcttatgtctttggttatctggtgatcgccaaagcgagtctgcggttttatattctggcggaagtcagccagttcactttattgatggtatttgcccactggctaatccctgcgcatggtgcactgggcgcggcgcaggcatatatggcaacttatatcgtctatttttctctttgttgtggcgtgtttttactctggcgtaggcgggcatgactgtactgattcacgtactgggaagcgatatccctcaccataaccgaaccgttttgcggtttttcaatgacgcgctggccgcgacgagcgagcacgcgcgcgagtttatggttgttggcaaggacgacggcttaagtgatagctgtccggcgctttctgtgcaatttttccctgggaaaaaaagcctggcggaagcggtcatcgcgaaagcaaaagctaaccgtcagcagcgttttttcttccacggtcagttcaatcccacactgtggctggctctgctgagtggtggcattaagcccagccagtttttctggcatatctggggggcagacctgtatgagctttccagtggcttgagatataagcttttttacccactacgtcgcctggcgcaaaagcgagtcggctgtgtatttgccacccgcggcgatttgagcttttttgccaaaacgcacccaaaggtgcggggcgaactgctgttcttcccgacgcggatggaccctagcctcaatacgatggcgaacgatcggcaacgtgaagggaaaatgaccattctggtggggaactccggcgaccgcagcaatgagcatattgctgccttgcgcgccgttcatcagcaatttggcgatacggtaaaagtggtggtgccgatgggatatccgcctaataacgaagcgtacattgaggaagttcgtcaggcggggctggagttattcagcgaagaaaatctacaaattctgagcgaaaaactggaatttgacgtctatctggcgctacttcgtcagtgcgatcttggttactttatttttgcccgccagcagggcattggtacgctgtgcttactgattcaggcgggcattccttgtgtgcttaaccgggaaaatccgttctggcaggatatgacggaacaacatttgccggtgctgtttactaccgacgatctcaacgaggatattgtgcgtgaagcgcagcgccagttggcgagcgtggataaaaacaccattgccttctttagccctaactatctacaaggctggcagcgggcgttggcgattgccgccagggaggtcgcatgagtctgctgcaattcagtggcctgtttgttgtctggctgctctgcacgctgtttattgccacgctgacctggtttgagtttcgccgtgtgcgctttaacttcaatgtcttctttagtttgctgtttttgctcacctttttcttcggcttcccgctgaccagcgtgctggtatttcgctttgatgttggtgtcgcgccgccagaaatcttgttgcaggcgttgctttctgcgggctgcttctacgcggtttactatgtcacctacaaaacccgcctacgcaaacgcgttgctgatgtaccgcgccgtccgctgtttaccatgaaccgcgtggagaccaatcttacgtgggtgatcctgatgggtatcgcgctggtaagcgtcggcatcttcttcatgcacaacggctttttgctgttccggcttaactcctacagtcagatcttttccagtgaagtctccggcgtggcgttaaaacgcttcttttactttttcatcccggcgatgctggtggtctactttctgcgccaggacagcaaagcgtggctgtttttcctcgtcagcacggtcgcctttggcttgctgacttatatgattgtcggcggcactcgcgccaatatcatcatcgcattcgctatcttcctgtttattggcattattcgcggctggattagcttgtggatgctggcggcggcgggcgtgctggggattgttggcatgttctggctggcactaaaacgctatggaatgaatgtgagcggcgatgaagcgttctatacgtttctctatctcactcgcgacaccttcagcccgtgggagaatctggcgttgctgttgcagaactacgacaacatcgacttccagggcctggctccaattgtccgcgatttctatgtctttatcccttcctggctgtggccgggtcgcccgagtatggtgctgaacagtgccaactactttacctgggaagtgctgaataaccactccggactggcgatcagccctacgcttataggcagtctggtggtgatgggcggcgcgttgttcatcccgctcggggcgatcgtggttggtctgatcatcaaatggttcgactggctgtatgagctgggcaaccgcgagcctaatcgctataaagctgcgatattgcacagtttctgctttggggcgatcttcaatatgatcgtgctggcgcgtgaagggctggatagctttgtcagtcgcgtggtcttttttatcgtggtcttcggcgcatgtctgatgatcgcaaaactgttgtactggctttttgaaagcgccggactcattcataaacgtacaaaaagtagcctccggacgcaggttgaaggataacaatgaataacaacaccacggcaccaacctatacgctgcgtggcttacagttgattggttggcgtgatatgcagcacgccctcgattatctgtttgctgacgggcagcttaagcagggaacgctggttgccattaatgctgaaaaaatgctgactattgaagataacgccgaggtcagggagttaattaacgctgccgaatttaaatatgcggatggcatcagcgttgtacgtagtgtacgtaaaaagtacccgcaggcgcaggtttcccgcgttgccggtgccgatctctgggaagagctgatggcgcgcgcaggcaaagaagggacgccggtatttcttgtgggcggtaaacctgaagtgctggcgcaaactgaagctaaactgcgcaaccagtggaatgtgaatatcgttggcagtcaggatggttattttaaacccgagcagcgtcaggcgctgtttgaacgcattcatgccagcggtgcgcaaatcgtcaccgttgcgatgggaagcccaaagcaggagatcatcatgcgcgactgccgtctggtacatccagatgcgctgtatatgggcgttggcgggacttacgatgttttcaccggtcacgtaaaacgcgcaccgaaaatctggcaaacgctggggctggagtggctctaccgcctgcttagccagccgagccgcattaagcgtcagcttcgtttgctgcgttatttacgctggcactacaccggcaacctatgattttcctctctttgtaaagcgacggagtggtcactccgtcgcctgtctgcttttttattacacaaagcattcaaatttttaatgctttatttgccatttctcctgaattacgaaaacatttgcaacactcgatgtacccataacgataaccggtaacaccggaaagcatgcaaacacaacacgaggatttatggcagataacaaaccagagctacagcgtgggctggaagctcgacatatcgaactcatcgccctggggggcaccattggcgtcggcctgtttatgggggccgccagtaccctgaaatgggccgggccatccgtattgttggcctatatcatcgccgggctgttcgtctttttcatcatgcgtagtatgggcgaaatgttgttcctcgaaccggttaccggtagcttcgccgtttatgcgcatcgttatatgagcccgttctttggctatctcaccgcctggtcttactggtttatgtggatggcggtggggatctctgaaatcaccgccattggcgtttatgtccagttctggttcccggagatggcgcagtggatacccgcattgatcgcagtggcgctggtggcgttggcgaatctggcggcggtgcggttgtacggcgaaatcgagttctggttcgcgatgatcaaagtcaccacgattatcgtgatgattgtcattggcctgggcgtgattttctttggctttggcaatggcgggcagagcattggttttagcaatctcacagagcatggcggtttctttgcgggtggctggaaagggttcctgaccgctctgtgtattgtggtggcgtcctaccagggcgtggagctgattggcattactgccggtgaagcgaagaatccgcaggtgacgctgcgcagtgccgtaggcaaggtgctgtggcggatcctgattttctacgtaggcgcgattttcgttatcgtcaccatcttcccgtggaatgaaataggcagcaacggcagcccgttcgtactgacttttgccaaaatcggtattaccgcagcggcgggcattatcaactttgtggtgctgacggctgcgctctctggctgtaacagcggcatgtacagttgcggacgtatgctctacgcactggcgaaaaaccgtcagttaccggcggcaatggcgaaagtttcccgtcacggcgtaccggttgcgggtgtggcagtatctattgctattctgctaattggcagttgcctgaactacatcattcccaatccgcagcgtgtgtttgtctacgtctacagtgccagcgtgcttccggggatggtgccatggtttgtgatattgataagccagctgcgttttcggcgtgcacataaagcggcgattgccagccatccgttccgcagtatcctgttcccgtgggccaattacgtaacaatggcattcctgatttgcgttttgatcggcatgtactttaatgaagatacgcgtatgagcctgtttgttggcatcatctttatgctggcggtgacggcgatttataaagtttttggccttaatcgccacgggaaagcgcataaactggaggaataagcagcaaaacgcacaaaccgtaaccaaacgcgcaatttatttaaaaagggactagacagaggggtgggaagtccgtattatccacccccgcaacggcgctaagcgcccgtagctcagctggatagagcgctgccctccggaggcagaggtctcaggttcgaatcctgtcgggcgcgccatttagtcccggcgcttgagctgcggtggtagtaataccgcgtaacaagatttgtagtggtggctatagctcagttggtagagccctggattgtgattccagttgtcgtgggttcgaatcccattagccaccccattattagaagttgtgacaatgcgaaggtggcggaattggtagacgcgctagcttcaggtgttagtgtccttacggacgtgggggttcaagtccccccccctcgcaccacgactttaaagaattgaactaaaaattcaaaaagcagtatttcggcgagtagcgcagcttggtagcgcaactggtttgggaccagtgggtcggaggttcgaatcctctctcgccgaccaattttgaaccccgcttcggcggggttttttgttttctgtgcatttcgtcaccctcccttcgcaataaacgcccgtaataactcattgccccacggtatgatttcgcccttaacgtattgaaggatgacttcaggcaaggagcgaccatgctgcaacaggttccaacgcgtgcttttcatgtgatggcgaaaccgagcggttccgattgtaatctgaactgtgactactgtttttatctcgaaaaacaatccctttaccgcgaaaagccagtcacgcatatggacgatgacacgctggaagcgtatgtccgtcactatatcgctgccagcgaaccgcaaaacgaagtggcttttacctggcagggcggcgaaccaacgctactcgggctggcgttttaccgccgtgccgtagcgctacaggcgaaatatggtgctggcaggaagataagtaacagcttccagactaacggcgtgctgctggatgacgaatggtgcgcgtttctcgcggagcatcattttcttgttggtttaagcctggatggcccgcctgagatccacaatcaatatcgcgtgactaaaggtggcagacccacgcataagctggtgatgcgtgccctgacgctcctgcaaaaacatcatgtcgactataacgtgctggtctgcgttaatcgcaccagcgcgcagcaaccgttgcaggtatatgattttttgtgcgatgcgggagtcgaattcatccagtttattccggtggtcgagcgcctggctgatgaaacaactgcccgcgatggacttaagttacatgcgcctggtgatattcagggtgagctaacggaatggagcgtgcgccccgaggagttcggtgagtttctggtggcgatattcgaccactggatcaaacgcgacgtcggcaagattttcgtgatgaatatcgaatgggcgtttgccaattttgtcggtgcgccgggtgcggtttgccatcatcagccaacctgtgggcgcagcgtgattgttgagcacaacggcgacgtttacgcctgtgatcactatgtttatccgcaatatcggctggggaatatgcaccagcaaacaattgcagaaatgatcgattccccgcaacagcaggcgtttggtgaagataaatttaagcagttaccggcgcagtgtcgcagttgtaacgtgttaaaagcgtgctggggaggctgcccgaaacaccgcttcatgctcgatgccagcggcaaaccgggactgaattatttgtgtgccgggtatcagcgttatttccgccatctaccgccatatcttaaagcaatggctgatttgctggcgcacggtcgcccggccagcgacattatgcatgcgcatttgctggtggtgagtaagtaaaaatcggcggccgcctgcggttgattgccggatgcggcgtaaacgccttatccggcctacatgatcgtgcaaattcaataaattgcagcgttctgtaggctggataagatgcgtcagcatcgcatccggcaaaggcagatctcagcgatagcgccggcttagtcagatttaatctgcgcgcgtggtggatattttttcaggatctccatatacgcgtgcatttcggtctgtagcggtacacccatcggaatatggcgcacgccgatggagtcgctttcctgcggatcggtgtagaggttaaacacgctgcttcccgccgtttgcattactgtgccggtgaatccaccctgatatccgctctgggtataagcgtaaggttgctgaatcaggacgtgatacttgaactcatccatacgcacagcagcgagtttaccgttgaggaagtagtgctcggccttacggttagactgaccatttgttcccaggaagaaggatgtctggtccacaccatcgataaaggtggttttcggcactaaattcgccactttcgctccaggatgccctgccagatccagcgcggtagggaagagatctgccagatcgacaataccgtcagatttacgcggttggatcatccctttccagtaaacgaaagtcggtacgcgaacgccgccttcccaggtgctacctttcgcaccacggaacggggtgcgtccgtgcggcggtacttcggcttccggtccgttatcggaggtaaagacgatcagcgtgttatcaagctgaccgtttttctccagtgttttatacagattagcgaacacatcgttcatctccaccatgcagtcgccatagctggtgcgtgccggagagctacccgcatatttcgcatttgggtagttatcgaagtggcagccacgagtgccgtagtagaggaagaatggtttatcgctcttcgccatcttgtcgaggaacttaacgccatagtccatccagcgttgatccagatcttccatatatttcggcgtaatgtcggcaatggcctgttgttcgccgccgcgcaccgcatgaacgtcatctttgctgaacggtaattgcttgatgtattcagaacggtccggactcagggccacttccggattgacgtgaacgtcgcgccattcggtgtacatatcagacacgctgttaaagccacggaaatcatcaaagccaacgttctgcggctggctctctttgttttcccccatatgccattttccgatggcctgagtgacgtagccctgatcgtgcagcaactgcggcagcgtggttaacccttgcagcccgcccggttgcccgtacattggcggcatcagaatgccgtggtggatggagtattgtccggtgagaatggtggcgcgggttggggaagagcttggttgagaatacgcgctagttaaaatcagcccctggctggcaacggcgtcgatatctggtgtagggttacccaccgccacgccgccaccgttaaaaccgacgtccatccagcccacatcgtccagcaagaaaacaaccacattcggtttcttaccggtttttttctcaagttctgccagcttctgctgggtttctttatcctgcgccggatgctgcattactggcatcatattgtcggcaatagtggtcgccggtttaaccagatactggtttgggtgatcgtatccggcaaagcctttgcgtgcggtggcagtactcggggtatctgctgcgctggccatgagaggaagagcggcggcgacagcaacaacaagacgtttgggactaaagctaaattccatgcaaaatgctccggtttcatgtcatcaaaatgatgacgtaattaagcattgataattgagatccctctccctgacaggatgattacataaataatagtgacaaaaataaattatttatttatccagaaaatgaattggaaaatcaggagagcgttttcaatcctacctctggcgcagttgatatgtaaggcaggtttattatatcgcgttgattattgatgctgtttttagttttaacggcaattaatatatgtgttattaattgaatgaattttatcattcataataagtatgtgtaggatcaagctcaggttaaatattcactcaggaagttattactcaggaagcaaagaggattacagaattatctcataacaagtgttaagggatgttatttcccgattctctgtggcataataaacgagtagatgctcattccatctcttatgttcgccttagtgcctcataaactccggaatgacgcagagccgtttacggtgcttatcgtccactgacagatgtcgcttatgcctcatcagacaccatggacacaacgttgagtgaagcacccacttgttgtcatacagacctgttttaacgcctgctccgtaataagagcaggcgtttttttatgtatcaggaaggccccggaggtgcttgcctccgggtgagaaggaattactgtggcgggttattctgcaacgttaacatcaaaccgtcgcgacgcatagctgcagcttcttccggcttgtgcagtctgtccagcgcgtcggcaagccatgcgtaatcgtaggcgtccggacgttgtttcagcgctgcgcggaaggcgaggcttgcttcctgccattctccgtgcttcatcagactctggcccagtgtgctccacaacagcgggcgatcgccgacgtttttgatttgctggcgcagcactttttccagctgttccggattgtttgttttcagtcgaggaatcggcagcagtaggcgatcgtcgtactggcgtttcaggccatcgatgataatttgctgggcagtatcatgatcgtcacattcaataagatgttccgccattgccacctgcaacgctacctgatgacgcgttttccggctttggtttttccaccagttacgcaaaccttcgctaccgttatcggcacgcgcctgatccatcaggccaatccatgcctgttgttccagcattgcacgatgttcttcatcaccaacatgggctttcgccatacttgggataatatccagcaggctactccatgcacctgtgcggatatacgcctgttccgccagacgtaatacttccggatggcgtggcgtaacttccagcagcttatccacgccgtggcgtgcagcatggttttcattacgggccagttgcagacgtacgcgggtgatttctaccggaatggtgtcgttgccggccagctccgctgcgcgttccagatgttggttggcgcgtgcttcatcaccacgttgttgcgcggcttcggcagccagtagatagttcaccaccggttgttccgcgtgatcggcatttttcgccatcagcttttcaacttgctgataatcgccttccgccagtttcagcagcgcctgttcggtctgcttacgtgcacggcgacgcttacgtccgacaaaccacccacgggtgtgcgcgccagtgcggaagatccgccgcagtagccactcaatggcaaacagcactaccatcgccagaatcaatatgatcgccaggcccgtgacgctggtttcgatattgtagttgtcggtctggatcagcacataaccctgatggccggcaatcatcgggccaaccacgatccccgcaatcagcaacacaaagagcaataacacttttagcatggttattctccttgcggcgcggctgccggagtatcagcttgcggtgcaggtgcaggtttagcttccgttgtccccgctgccggttgtgccagcaggttacgcacgcgagtctgcatcagtttttccagcatcgcctggctttgcagggtttccggaagatccatgctgatattttgctggcttaactggtccacctcgtcgaggaacgctttggtggtggcatcatcagtatcgtagtaagcacgtacccaggtggagacgttctccagcgcctggcgataagtctcttcctggtgacgcggtacagcttgtgctgcgaccagcaggcgagagcgaatattttcgcgcagatagatatcctgatttggcgctaacagcggtacggcggtgtcatcacgacggcgaatcgtaatgaagttgtccataaagttctgccagcttttttgcagattgatacgccattcgctgatggaactggaaagctcttcaccgtcactatccatcgggctaccatcgctgtcattatcggccagacgcaggttatctacctgattactaagctgattaagcttaaggatgatgccgtcataatccacctggcttactgcagaaaggctggcgatatcatcggtaattgcccgacgaacggtaatcagactcgggtcattcatatccgccaggctggcgtctgcacttttcagcaacgctgcagcggtcgtgacgtcctgatcgctccacagcttccgtccggcgagtttcaccagaaaatcggcctgagccagcagccaggttttagcatcgctgccggaaatggtggcgaccttttgttggacttcatccaactgttttgccagcgtttcttgctgacgattcgcctgcttaagttgtgcagcttgttgcttaataatgccttccagctcggctttttggctctcctgggctttttgcaatgccgtcagttggttagccagggcatcgctggtggcggtctgattgacggcctgttgtttaccccagccatacaaaccgatgcccgccgccagagcaatagcgatagccaccgcgctgagaatcaatgcggtattgttcttactctttttttctgttgcgacaggttgactcgtggtgtccacggcctccctggtctcttcaaccacggcggaggttttttcttgttccgtcattatggcttcctgttatgagagttattgtaatgcccgtaaaagcgcatcgttgtcagcgttatcggcgaccttaatgtcttgccagcccagttcccgggcgagtttcgccaaacgctcactgacgaccaatagtcgacagtgtagtaaccagtgctcacgataccattgtgggatcaggctccagagttgctgcaacatttcaccgctggtaacaacgaccatcgtcacctcgcgggcttgccagcgcatcgcttcttctgcaccatcgtaatggattgcgcatcgttgataacattcacaaaaagtgacctcagcaccgcgcgccgtcagggtatccccaattagctcacgaccaccattgccacgtaatatcagcgcacgtttgcccgcaatattttgtaattcaggtaattgtagcaagacttcgctgatttcccgatcctgcgggtagagaatcttctgtccacttacggtatgtagtgccagtgcggtggtgcgtccaatggcgaaataatcaggtagtcggggccatttacgatcttgctgatgcagctgactttgggcaaaagcaaccgcgtgttggctgagggcaaacaacagatcgctctcccccagcgctgccagttgatcagcaagttgcggtaattgttgacccggagaaaactcaatcagcggaaaatgccaggccacctgccccagtgtgcgcagacggctcactaactcttctccagcgggagacgggcgggtgacaaggatactcatgccggggcgtctccgttatagacttcagcgaggatctcgcgcgcgccgttattcagtagctcttctgccaggctaatccccatttgttcggcatcttgcggcgcaccgcggcgttcaccgcgaataatctggctaccgtccggcgcgccgaccagcgcacgcagccagatttcgccatcaataagctcggcgtagctaccaattggcacctgacatccgccttcgagacgggtattcatggcgcgttctgcggtaacgcgcagtgcagtttcgtggtgattcagcgcggcaagcagctcgcgagtgcgactatcatcaaggcggcattcaatacccaccgcaccttgtcctaccgccggaagagaaatctcgggtggcaacgcggcgcgaatacgactctccagacctaaacgttttagtccggctacggcaagaatgatggcatcgtattcgccgttatccagtttgctcaggcgagtgccgacgttgccgcgcagggagcggataatcagatccggacggcgttcagccagttggcactggcgacgtaaactggacgtcccgacgatactgcctgccggtaacgcatccagactgtcatagttattggacacaaaggcatcgcgaggatcttcacgctcacaaatagtgaccagtcccagaccttgcgggaattcaaccggcacatctttcatactgtgtacggcgatatcggcgcgattttcgaggagcgcgacttccagctcttttacaaataagccttttccgcctactttcgccagcggcgtatcaagaatcacatcgccgcgcgtcaccatcggtaccagttcaacgaccaggcccggatggctcgccatcaacttgtctttgacatagtgtgcctgccagagtgcaagtgggctttggcgtgtggcaattcttaaaacattgtctaacatgcttgttaccgtcattatcatccgtggtccatcctaacatccttgccagagtgatgtcagtgttgtggtgaaacgtagacgcctgcgcaaaccgtaaaatgaggtctggcagtggatcctgacaggcgtttcacgccgttgtaataaggaatttacagagaataaacggtgctacacttgtatgtagcgcatctttctttacggtcaatcagcaaggtgttaaattgatcacgttttagaccattttttcgtcgtgaaactaaaaaaaccaggcgcgaaaagtggtaacggttacctttgacatacgaaatatcccgaatgccgcgtgttaccgttgatgttggcggaatcacagtcatgacgggtagcaaatcaggcgatacgtcttgtacctctatattgagactctgaaacagagactggatgccataaatcaattgcgtgtggatcgcgcgcttgctgctatggggcctgcattccaacaggtctacagtctactgccgacattgttgcactatcaccatccgctaatgccgggttaccttgatggtaacgttcccaaaggcatttgcctttacacgcctgatgaaactcaacgccactacctgaacgagcttgaactgtatcgtggaatgagtgtacaggatccgccgaaaggtgagcttccaattactggtgtatacaccatgggcagcaccagctccgtagggcaaagttgttcctctgacctggatatctgggtctgtcatcaatcctggctcgatagcgaagagcgccaattgctacaacgtaaatgtagcctgctggaaaactgggccgccagcctgggtgtggaagtcagcttcttcctgattgatgaaaaccgcttccgtcataatgaaagcggcagcctggggggcgaagattgtggctccacccagcatatactgctgcttgacgaattttatcgtaccgccgtgcgtctcgccggtaagcgtattctgtggaatatggtgccgtgcgacgaagaagagcattacgacgactatgtgatgacgctttacgcgcagggcgtgctgacgccaaatgaatggctggatctcggtggcttaagcagcctttctgctgaagagtactttggtgccagcctttggcagctctacaagagtatcgattccccatacaaagcggtactgaaaacactgctgctggaagcctattcctgggaatacccgaacccacgtctgctggcgaaagatatcaaacagcgtttgcacgacggcgagattgtaagctttggtctcgatccatactgcatgatgctggagcgtgttactgaatacctgacggcgattgaagattttacccgtctggatttagtacgtcgctgcttctatttaaaagtgtgcgaaaagctcagccgtgaacgcgcctgcgtaggctggcgtcgcgcagtgttgagccagttagtgagcgagtggggttgggacgaagctcgtctggcaatgctcgataaccgcgctaactggaagattgatcaggtgcgtgaggcgcacaacgagttgctcgacgcgatgatgcagagctaccgtaatctgatccgctttgcgcgtcgcaataaccttagcgtctccgccagtccgcaggatatcggcgtgctgacgcgtaagctgtatgccgcgtttgaagcattaccaggtaaagtgacgctggtaaacccgcagattagtcccgatctcagcgaaccgaatctgacctttatttatgtgccgccgggccgggctaaccgtagtggttggtatctgtataaccgcgcgccaaatattgagagcatcatcagccatcagccgctggaatataaccgttacctgaataaactggtggcgtgggcatggtttaacggcctgctgaccagccgcacccgtttgtatattaaaggtaacggcattgtcgatttgcctaagttgcaggagatggtcgccgacgtgagccaccatttcccgctgcgcttacctgcaccgacaccgaaggcgctctacagcccgtgtgagatccgccatctggcgattatcgttaacctggaatatgacccgacagcggcgttccgcaatcaggtggtgcatttcgatttccgtaagctggatgtcttcagctttggcgagaatcaaaattgcctggtaggtagcgttgacctgctgtaccgcaacagctggaacgaagtgcgtacgctgcacttcaacggcgagcaaagcatgatcgaagccctgaaaactattctcggcaaaatgcatcaggacgccgcaccgccagatagcgtggaagtcttctgttatagccagcatctgcgcggcttaattcgtactcgcgtgcagcaactggtttctgagtgtattgaattgcgtctttccagcacccgccaggaaaccgggcgtttcaaggcgctgcgcgtttctggtcaaacctgggggttgttcttcgaacgcctgaatgtaagcgtacagaaactggaaaacgccatcgagttttatggcgcgattagccataacaaactgcacggcctgagtgtgcaggttgaaaccaatcacgtcaaattaccggcggtggtggacggctttgccagcgaagggatcatccagttctttttcgaagaaacgcaagacgagaatggctttaatatctacattctcgacgaaagcaaccgggttgaggtatatcaccactgcgaaggcagcaaagaggagctggtacgtgacgtcagtcgcttctacagcagtagccatgaccgttttacctacggcagtagcttcatcaacttcaacctgccgcagttctatcagattgtgaaggttgatggtcgtgaacaggtgattccgttccgcacaaaatctatcggtaacatgccgcctgccaatcaggatcacgatacgccgctattacagcaatattttagctgatgaacgtgccggaaagcgaggcttatccggcatgcaatcttagcggaaactgactgtttcacccgcctgctgcgtcgccgcctgttccagcaaatcccagaaggtttcgccgctgcgatcacaaatccactcatcgcctttcaggtcaaaatggtagccgccctgtttggttgccagccatacctggtgcagcggctcctggcggttgataatgattttgctgccattctcaaaggtaatggtcagtacgccgccgttgatttcgcagtcgatatcgctgtcgccatcccagtcgtccaggcgttcttcaatggtcagccagagttgatcagccaggcgatgaaattcactgtcgttcattgttgtatcctgtttttaagtgatggcggcagtatagcggcatggggtcagggcttcaaagtttgcacctctgcggctgcgttccggcacgatagttccgtcaccggaataatgatgtctctgtgtagcgaaagatttgtctctagtttagggcgcagttacaccacgtctttccctgtttctggtaaacattatgatcaggtttaccgagcgagcatcctcacgctgacggaactaaaaaagacaacaaacaaaccacattgcgatagtgcataaagccatcctggcgcgaggtgccgatcacgaaactaccagcaaaacataaatccccacgagtaagcgttatactcgcagcatttcctcacttttcagacttcataaagagtcgctaaacgcttgcttttacgtcttctcctgcgatgatagaaagcagaaagcgatgaactttacaggcaatccataatgaaaaacgtgtttaaggcactcactgtattacttactctcttcagcctgacgggctgcggtctgaaaggtccgctctatttcccgcctgcagataaaaacgcaccgccgccgaccaaaccggtagagacgcaaacgcaatccacggtgccggataaaaacgatcgcgccactggcgatggtccatcccaggtgaattactaaaagtcagtttctgtacccgcgtgattggagtaaatgatgcagttcagcaaaatgcatggccttggcaacgattttatggtcgtcgacgcggtaacgcagaatgtcttttttagtccggagctgattcgtcgcctggctgatcggcacctgggggtagggtttgaccaactgctggtggttgagccgccgtatgatcctgaactggattttcactatcgcattttcaatgctgatggcagtgaagtggcgcagtgcggcaacggtgcgcgctgctttgcccgttttgtgcgtctgaaaggactgaccaataagcgtgatatccgcgtcagcaccgccaacgggcggatggttctgaccgtcaccgatgatgatctggtccgcgtaaatatgggcgaacccaacttcgaaccttccgccgtgccgtttcgcgctaacaaagcggaaaagacctatattatgcgcgccgccgagcagacaatcttatgcggcgtggtgagcatgggaaatccgcattgcgtgattcaggtcgatgatgtcgataccgcggcggtagaaacgcttggtcctgttctggaaagccacgagcgttttccggagcgcgccaatatcggttttatgcaagtggttaagcgcgagcatattcgtttacgcgtttatgagcgtggggcaggagaaacccaggcctgcggcagcggcgcgtgtgcggcggttgcagtagggattcagcaaggtttgctggccgaagaagtacgcgtggaactccccggcggtcgtcttgatatcgcctggaaaggtccgggtcacccgttatatatgactggcccggcggtacatgtctacgacggatttattcatctatgaagcaaccaggggaagaactgcaggaaacactcacggagcttgatgaccgggcggttgtcgattatctgattaaaaatcctgagttttttatccgtaatgcgcgcgcagtagaagcgatacgtgtgccgcatccggtacgcggcaccgttagcttggtcgagtggcacatggcccgcgcacgtaatcatattcatgttctggaagagaacatggcgctgttgatggaacaggctatcgccaacgaaggcctgttttatcgcctactctacctgcagcgcagtctcaccgccgccagcagtctcgacgatatgctgatgcgctttcaccgctgggcgcgcgatctcggcctggcaggtgcgagtctgcgcctgtttccggatcgctggcgcttaggtgcgccgagcaaccacactcatctggcattaagccgtcagtctttcgaaccgctgcgtattcagcgtttggggcaggaacagcactatcttgggccgcttaacggaccagagctgctggtggtgctaccggaagcgaaagcggtgggaagcgtggcgatgagcatgctgggaagcgatgctgatttgggtgtcgtgctgtttaccagtcgcgatgccagtcactatcaacaagggcaaggaacgcagttacttcatgaaattgcgctgatgttgccggagcttctggagcgttggattgaacgcgtatgaccgatttacacaccgatgtagaacgctacctacgttatctgagcgtggagcgccagcttagcccgataaccctgcttaactaccagcgtcagcttgaggcgatcatcaattttgccagcgaaaacggcctgcaaagctggcagcaatgtgatgtgacgatggtgcgcaattttgctgtacgcagtcgccgtaaagggctgggagcagcaagtctggcgttacggctttctgcgctacgtagcttttttgactggctggtcagccagaacgaactcaaagctaacccggcgaaaggtgttagcgcaccgaaagcgccgcgtcatctgccgaaaaacatcgacgtcgacgatatgaatcggctgctggatattgatatcaatgatcccctcgctgtacgcgaccgtgcaatgctggaagtgatgtacggcgcgggtctgcgtctttctgagctggtggggctggatattaaacacctcgacctggagtctggtgaagtgtgggttatggggaaaggcagcaaagagcgccgcctgccgattggtcgcaacgctgtggcgtggattgagcactggcttgatttgcgcgacctgtttggtagcgaagacgacgcgctttttctgagcaaactgggcaagcgtatctccgcgcgtaatgtgcagaaacgctttgccgaatggggcataaaacaagggctgaataatcacgttcatccgcataaattacgtcacagcttcgccacgcatatgctggagagcagcggcgatcttcgtggtgtgcaggagctgctgggtcatgccaacctctccaccacgcaaatctatactcatcttgattttcaacaccttgccagcgtgtacgatgcggcgcatccacgcgccaaacgggggaaataatgcgtttttaccggcctttggggcgcatcagcgcgctcacctttgacctggatgataccctttacgataaccgtccggtgattttgcgcaccgagcgagaggcgcttacctttgtgcaaaattatcatccggcgctgcgcagcttccagaatgaagatctgcaacgcctgcgccaggcggtacgggaagcggaacccgagatttatcacgacgtgacgcgctggcgttttcgtagcattgaacaagcgatgctcgacgccgggctgagtgccgaagaagccagtgcaggcgcacacgcagcaatgatcaactttgccaaatggcgcagccgaatcgacgtcccgcagcaaactcacgacaccttaaaacagctggcgaagaaatggccgctggtggcgatcaccaacggtaacgcccagccggagctgtttggtttgggggattattttgagtttgtgctgcgcgctggcccgcacgggcgcagtaaaccgttcagcgatatgtactttttggctgcggaaaaactcaacgtgccgatcggcgagatcttacatgttggggacgatctcaccactgacgtgggtggggcaattcgcagcggaatgcaggcttgttggatcagaccggaaaatggcgatctgatgcaaacctgggacagccgtttactgccgcatctggaaatttcccggttggcatctctgaccagcctgatataatcagcaaatctgtatatatacccagctttttggcggagggcgttgcgcttctccgcccaacctatttttacgcggcggtgccaatggacgtttcttacctgctcgacagccttaatgacaaacagcgcgaagcggtggccgcgccacgcagcaaccttctggtgctggcgggcgcgggcagtggtaagacgcgcgtactggtgcatcgtatcgcctggttgatgagcgtggaaaactgcagcccatacagcattatggcggtgacgtttaccaacaaagcggcggcggagatgcgtcatcgtatcgggcaactgatgggcacgagccagggcggtatgtgggtcggcaccttccacgggctggcgcaccgtttgctgcgtgcgcaccatatggacgccaatctgccgcaggatttccagatcctcgacagtgaagaccagctacgcctgcttaagcgtctgatcaaagccatgaacctcgacgagaagcagtggccgccgcggcaggcaatgtggtacatcaacagccagaaagatgaaggcctgcgtccgcatcatattcaaagctacggtaatccggtggagcagacctggcagaaggtgtatcaggcgtatcaggaagcgtgtgaccgcgcgggcctggtggacttcgccgagctgctgctgcgcgctcacgagttgtggcttaacaagccgcatatcctgcaacactaccgcgaacgttttaccaatatcctggtggacgaattccaggataccaacaacattcagtacgcgtggatccgcctgctggcgggcgacaccggcaaagtgatgatcgtcggtgatgacgaccagagtatctacggctggcgcggggcgcaggtggagaatattcagcgtttccttaatgatttccccggtgccgaaactattcgtctggagcaaaactaccgctctaccagcaatattctgagcgccgctaacgccctgattgaaaacaataacgggcgtctgggtaaaaaactgtggaccgatggcgcggacggtgagcctatttccctctattgcgcttttaacgaactcgatgaagcgcgttttgtggttaaccgcatcaaaacctggcaggacaacggcggagcgcttgccgagtgcgccattctctaccgcagcaacgcccagagccgggtgctcgaagaggcgttattgcaggccagtatgccgtaccgtatttacggcgggatgcgcttcttcgaacgccaggaaatcaaagatgcgctcagctatctgcgcctgattgccaaccgcaacgacgacgcggcctttgagcgtgtggtgaatacgccaacgcggggtattggtgaccggacgctggacgtggtacgtcagacaagccgcgatcgccagttaacactctggcaggcatgtcgtgagctgttgcaggaaaaagccctcgccgggcgagctgccagcgccttgcagcgatttatggaattaatcgacgccttagcgcaggaaactgccgatatgccgctgcatgtacagactgaccgggtaattaaagactccggcctgcgtaccatgtatgagcaggagaagggcgaaaaaggtcagacgcgtatcgaaaacttagaggaactggtgacggcaacgcgccagttcagctacaacgaagaagacgaagatttaatgccgctgcaggcgttcctctcccatgcggcactggaagcaggtgaagggcaggcggatacctggcaggatgcggtgcagttgatgacgctacacagcgcgaaaggcctggagttcccgcaggtgtttatcgttggtatggaagagggcatgttcccaagccagatgagcctggatgaaggcgggcgtctggaagaagaacgccgtctggcctacgttggcgtaacccgcgcgatgcagaaactgacgctgacctacgcggaaacccgccgtctgtatggtaaagaggtttaccatcgcccgagccgctttatcggcgagctgccggaagagtgtgtggaagaggtgcgcctgcgcgccacggtaagccgcccggtcagccatcagcggatgggtacgccgatggtcgagaacgacagcggctacaagctcggccagcgcgtacgccacgctaagtttggtgaaggcaccattgtcaatatggaaggcagcggtgagcatagccgtttgcaggtggcatttcagggccagggtattaaatggctggtggcggcatacgcccggctggagagcgtgtaacgttgccggatgcggtgctgcgcaccttatttggcctaaaaaatcattcagattcaataaattgcaacgtcatgtaggccggatagggcgtttacgccgcatccggcatctgcgccatcttcagtatctgacacaaaactatcgttttaacctttccgctcgacggaaatcatggtgacaaaaggatagcgttgccacgggattgccccgcctttcatatacatatgactaatcgtgccatcaagataaagcagctgctcaacgttcagtttcgctttggcataacaggcaaaatcataaaaatttgttgcctgctggctcaacaaaaacacggcgttcccatgtttattaatcccaacaccgttacgaattttgctactggcgacgttgggatgaatacgcggattaattacaccgttttccatcaacattggcccactctgcaccgcaaactgaatctctttactggttttgaaggcatccagacgaacgatgccgactttatctcccgcgacataaaacacgccgccaggacggataaagaaattcccttcaccactagcgagatttaacgccaccttctgctgaccgttttcgatgtacaaaccgagcggcgcatagctttcatcatagatgccgccgttcatcgccatctgcacctgaccctgactattaatatccgccagcagagcatgtaacgttccccacgcttcgccattggctttttgccagtacattttcacccgctctgtttgaggattaacggtatacgcctgtacggtcagcgtcggatcactgagtgcgcaatcatcagcggcaacagcaaacaagggaggtaaggtgagggcgagaaaaatccgtttgagattcaaggtgatcattcctttaccaatgagtagctgatgcgccattataggtcctggatgtgggatttttttatcctgttagcgaccttgacgagtaccaaaaagcgcgaagttcaactattgttctgtggtgttctgttgcgtgttgacggcaaaattttgctggcgtaacatgcgcgcacgatcactctaagaggacattcgccttggacacacccagtagatactggctcactatcctgtcatccaggatcaactcctaaggctatccctttttgctgatagccttagcggttgtcagcgacctcaatttttcccgtcgcgctgagtcaggctgtttaatggtctgaaacccaatttgtttctgtgtgcccaccgaactgtccgatattttaagcattgggagtcccggtcatgctgagcgcatttcaactggaaaataaccgactgacccggctggaagtcgaagagagtcaaccccttgtaaatgcagtatggattgatcttgtcgaaccggacgacgacgagcgactgcgcgtacaatctgaacttggccagagcctggcaacccgcccggaactggaagacatcgaagcaagcgcacgtttctttgaagacgacgacggcctgcatattcactccttcttcttctttgaagatgcggaagatcacgccggtaactccactgtggcatttaccatccgtgatggtcgtctgtttactctgcgtgagcgtgaactgcccgcttttcgtctgtatcgtatgcgtgcccgtagccagagcatggtagacggtaacgcctacgagttgctgctggatctgttcgaaaccaaaatcgaacagttggcagatgaaattgaaaatatctatagcgacctggagcagttgagccgggtgattatggaagggcatcagggcgatgagtacgacgaggcgctctccactctggcggaactggaagatatcggctggaaagttcgcctgtgtctgatggatacccagcgcgcgctcaacttcctggtgcgtaaagcgcgtttaccgggtgggcaactggagcaggcgcgtgaaatcctgcgagatatcgaatccctgctgccgcataacgaatccctgttccagaaggtgaacttcctgatgcaggcggcaatgggttttatcaacatcgagcagaaccgcatcatcaaaatcttcagcgtggtatccgtggtattcctgccgccgacgctcgttgcttccagctatggcatgaactttgagtttatgccagaactgaagtggagcttcggctaccctggcgcgattatctttatgatcctcgcgggcctggcaccgtatctgtactttaagcggaagaactggttgtaaaaaacgagagcggtggcttagtctggctaagccacctgttattcaaaggctccaggtatttaacccttttacctctttctcatagaaccatttgttcgtgttaacagcaacataggctgctacggcaattcccagaatgttaacgccaattagtgcaccaacaaatagagatagaataccaagtaatagaactataattgcttttttccataaccccaggacaaataaatatatccaggaacagaagaaagcaatgaaattcatttgaatagttaagcgttgtcttacttttaatgctttaaatgctgctttatattctggtgttgccccccagaatccaggaaaaccatgttgatcataaaaattaaatcggtatttccatttttcacttaaactaccatcgttcatatattccttactcataaatactccataattattgtttactactatcagtaggtgcaagcattagcatactgaaagtggaaaaataacaaatcaaaaaaatcatgctaccattgccactacaggcaaaatcttcggctatcattgtgatgatagagatgatatatactgctaatgtaccaaaaacataagtttttatatagatgaaaccactatcacggagtcgctggcaattcatgttgatgacgagataatggagtacgatggtagagactataacaagaaagcctgcttctccatcgttaaaaaagataataagaaaggcaaaaatgaaatttattaaaataaaactaaatatataacgacgtctggaaatcttaccgttagatgttgggataaatatacgtaacataaattttacatccttgtatgagtctccggtcagcatggcaatatgcccactctcatgcaagagtcggcatattttttcagaatatatttattttttatttggacgttctacgctgcgtataaatcgcatccatcacaaaaattgccagcgccacccaaataaaggcgaaagtcaccatcttatcggcacccggtttttcaccataaaacgtcacagccagcaggaacatcagcgtcgggccaatgtactggaaaaagcctaacgtactgagacgcaagcgcgtggcagcggcggtaaaacacaacagcggtacggtagtgacaataccggcggcgatcagcagtaaattcaggctcatcgggttttgccccatatggctggtactgctgtcggcaatagcaaacaggtaaattgccgccacgggcagcagccacatggtttcgattaacatgccggtttgcgcttcaacggcaatcttcttgcgtaccagaccgtagaaggcaaaactaaatgccagtcccagcgcgataataggtaggctaccaaaagtccacagctggactaacacgccacatatcgccagaatcaccgccagccattgcatccggcggaatcgctcgccgaggaaaatcatccccagcacaatgttcaccagcgggttaataaagtaaccaaggctcgcttccagcatatggtgattgttcaccgcccagataaacagtagccagttgccaccaatcagcacggcagagactgccagcataaaaattttctgtggcgtctgaatcagcgtttttaaataggaccactggcggcaaatgctcatcagcaccaccataaagaaaaagctccagatcacgcgatgcgtcaggatttcatcggcgggcacgtagtaaatcaacttgaagtacgctggcgctataccccaaataaaataagcggcaagagcgagtaatacgccctgccgcgtttgttttgcatccatcgggaatactcatttttaattggtaacagcagtttacctgcttttatgtcttcaacctaccatataggtggcggtggcactggcaatataaagctgttcttcattgtgtaattcaacgcgggcgacggcgactttattgcctgcacgcaacaggctactagtagcagtaaaacgctcgcccctgcctgggcgcagataatcaacgcgaagatcaatggtccccatccggcttagccgctggcgtagttcatcttcactgatggtttcgtggcgggttaaggtacttcccacgcacaccagaccggcggcgacatccagcgcgctcgcaatgaccccgccgtgcaaaatgctttgcgcccagttgcccaccatcattggctgatttttaaaggccagctgtgcgaactctttttcgtaacgctccagttccatccccaatgcgcggttaaatggcatgtgataaacaaacatctcacccactaatttcagggcttgttcagcggtcagtacggcagacatatcatccttacacttcattggttaatgaaatgttgattttatgcttctttgttgttggtttctactttaggaagggataactaacggctatggagttaagtatgtaaaatagcccgcagaaaaatattcaccttatcaataattcgttacggagaacacgaccgatgcggactctgcagggctggttgttgccggtgtttatgttgcctatggcagtatatgcacaagaggcaacggtgaaagaggtgcatgacgcgccagcggtgcgtggcagtattatcgccaatatgctgcaggagcatgacaatccgttcacgctctatccttatgacaccaactacctcatttacacccaaaccagcgatctgaataaagaagcgattgccagttacgactgggcggaaaatgcgcgtaaggatgaagtaaagtttcagttgagcctggcatttccgctgtggcgtgggattttaggcccgaacagcgtgttgggtgcgtcttatacgcaaaaatcctggtggcaactgtccaatagcgaagagtctagtccgtttcgtgaaaccaactacgaaccgcaattgttcctcggttttgccaccgattaccgttttgcaggttggacgctgcgcgatgtggagatggggtataaccacgactctaacgggcgttccgacccgacctcccgcagctggaaccgcctttatactcgcctgatggcagaaaacggtaactggctggtagaagtgaagccgtggtatgtggtgggtaatactgacgataacccggatatcaccaaatatatgggttactaccagcttaaaatcggctatcacctcggtgatgcggtgctcagtgcgaaaggacagtacaactggaacaccggctacggcggcgcggagttaggcttaagttacccgatcaccaaacatgtgcgcctttatactcaggtttacagcggctatggcgaaagcctcatcgactataacttcaaccagacccgtgtcggtgtgggggttatgctaaacgatttgttttgatgaacggttgagtggttggcaaatctggaatccagcatccaggattaccctctcagagactaaaagcattgcagtttctcgcgcaggcgctgaaaatagcgcctgtttttatttcaggcaatcggggtgaatgtggcgcaggcggaagtgttgaatctggagtccggagctaaacaggttttacaagaaacctttggctaccaacagtttcgccccggccaggaagaaattatcgacactgtgctttccggccgcgattgcctcgtcgtcatgcccactggtggcggaaaatccctttgctatcaaatccctgccttattgctaaacggccttaccgtggttgttagtccgctgattagcttgatgaaagatcaggtggatcaactgcaagccaacggcgtggcggcggcgtgccttaacagcacgcaaacccgcgaacagcaacttgaagtgatgacaggctgccgcaccgggcaaattcgtctgctttatatcgccccggaacgcctgatgctggataactttcttgagcatctggcgcactggaatccggtgttattagccgttgatgaagcgcactgtatctcccaatggggccacgatttccgcccggaatatgccgcgctcggtcagttgcgccagcggttcccgacgctgccgtttatggcgctgaccgccacagccgacgacaccacgcgccaggatatcgtgcgcctgctggggctgaacgatccgctgattcaaatcagcagttttgaccgtccgaatattcgctacatgctgatggagaagttcaaaccgctcgatcagttgatgcgctacgtgcaggaacagcgcggtaagagtggcattatctactgcaacagccgcgcgaaagtagaagacaccgctgcgcgcctgcaaagcaagggaattagcgcggcggcctatcatgccgggctggaaaataatgttcgcgccgatgtgcaggaaaaattccagcgcgatgacctgcaaattgtggtggcgacggtggcgttcggcatgggcatcaataaaccaaacgttcgcttcgtggtccactttgatattccgcgcaatatcgaatcctattatcaggaaaccggacgcgccgggcgtgatggcctgcccgcggaagcgatgctgttttacgatccggctgatatggcgtggctgcgccgttgtctggaagagaagccgcaggggcagttgcaggatatcgagcgccacaaactcaatgcgatgggcgcgtttgccgaagcgcaaacttgccgtcgtctggtattgctgaactattttggcgaagggcgtcaggagccgtgcgggaactgcgatatctgcctcgatccgccgaaacagtacgacggtagtaccgatgctcagattgccctttccaccattggtcgtgtgaatcagcggtttgggatgggttatgtggtggaagtgattcgtggtgctaataaccagcgtatccgcgactatggtcatgacaaactgaaagtctatggcatgggccgtgataaaagccatgaacattgggtgagcgtgatccgccagctgattcacctcggcctggtgacgcaaaatattgcccagcattctgccctacaactgacagaggccgcgcgcccggtgctgcgcggcgaatcctctttgcaacttgccgtgccgcgtatcgtggcgctcaaaccgaaagcgatgcagaaaagcttcggcggcaactatgatcgcaaactgttcgccaaattacgcaaactgcgtaaaagcatagccgatgaaagtaatgtcccgccgtacgtggtgtttaacgacgcaaccttgattgagatggctgaacagatgccgatcaccgccagcgaaatgctcagcgttaacggcgttgggatgcgcaagctggaacgctttggcaaaccgtttatggcgctgattcgtgcgcatgttgatggcgatgacgaagagtaatcagcagcataaaaaagtgccagtatgaagactccgtaaacgtttcccccgcgagtcaaatgtatgttgatgttatttctcaccgtcgccatggtgcacattgtggcgcttatgagccccggtcccgatttcttttttgtctctcagaccgctgtcagtcgttcccgtaaagaagcgatgatgggcgtgctgggcattacctgcggcgtaatggtttgggctgggattgcgctgcttggcctgcatttgattatcgaaaaaatggcctggctgcatacgctgattatggtgggcggtggcctgtatctctgctggatgggttaccagatgctacgtggtgcactgaaaaaagaggcggtttctgcacctgcgccacaggtcgagctggcgaaaagtgggcgcagtttcctgaaaggtttactgaccaatctcgctaatccgaaagcgattatctactttggcagcgtgttcagtttgtttgtcggtgataacgttggcactaccgcgcgctggggcatttttgcgctgatcattgtcgaaacgctggcgtggtttaccgtcgttgccagcctgtttgccctgccgcaaatgcgccgtggttatcaacgtctggcgaagtggattgatggttttgccggggcgttatttgccggatttggcattcatttgattattagccggtgatgccagacgcgtcttcagagtaagtcggataaggcgtttacgccgcatccgacattatttttcacgcatgcctcgcgcttgctaacagcgctcccaccagcataaacaagctgccgaaaatcttattcagcgccttcatctgctttggtcctttaatccatagagcaatccgttgagcaagggtggcgtaaccgatcatcacaataatatcgaccacaatagtggtgacgccgagcacgatatactgcatcagttgcggctgttgcggcatgatgaattgcggaaatagcgccgccagaaacacaatacttttgggattggtgagattcacaaaaactgcgcgctggaacaaatgtcgacggctttgagtagaggccaggcttttaaggtcaattgcaccagcggcgcgccactgctggattcccagccaaatcaagtaagccgcgcctgcccacttcaacacttcaaacgcaatcacactgcgggaaaatagcgtccccaaccccacgccaaccagcacaatatgaatcgccagtccggtctgaagcccagcaatagacgccaccgcgccgcgataaccgtggttgaggctggtggtcatagtgttgattgcaccagagcctgggctcaggcttaaaatgatgcttgtcagcaggtaggcaaaccaccattctaaggtcatgatgaactcccggtgtgtctatttttgtgccacaatacgctactgtcgcagcgttgtgtcaggcacgctaaaaaaaacgattttacgtggtttaagaggcagattacccgatgtttcagcagcaaaaagactgggaaacaagagaaaacgcgtttgctgcttttaccatgggaccgctgactgatttctggcgtcagcgtgatgaagcagagtttactggtgtggatgacattccggtgcgctttgtccgttttcgcgcacagcaccatgaccgggtggtagtcatctgcccggggcgtattgagagctacgtaaaatatgcggaactggcctatgacctgttccatttggggtttgatgtcttaatcatcgaccatcgcgggcagggacgttccggtcgcctgttagccgatccgcatctcgggcatgttaatcgctttaatgattatgttgatgatctggcggcattctggcagcaggaggttcagcccggtccgtggcgtaaacgctatatactggcacatagcatgggcggtgcgatctccacattatttctgcaacgccatccaggtgtatgtgacgccattgcgctaactgcgccaatgtttgggatcgtgattcgtatgccgagttttatggcacggcagatcctcaactgggccgaagcgcatccacgtttccgtgatggctatgcaataggcaccgggcgctggcgcgcgttgccgtttgctatcaacgtactgacccacagcagacagcgatatcgacgtaacttacgcttctatgctgatgacccaacgattcgcgtcggtgggccgacctaccattgggtacgcgaaagtattctggctggcgaacaggtgttagccggtgcgggtgatgacgccacgccaacgcttctcttgcaggctgaagaggaacgcgtggtggataaccgcatgcatgaccgtttttgtgaactccgcaccgccgcgggccatcctgtcgaaggaggacggccgttggtaattaaaggtgcttaccatgagatcctttttgaaaaggacgcaatgcgcagtgtcgcgctccacgccatcgttgattttttcaacaggcataacagtcccagcggaaaccgctctacagaggtttaaatttcttatgtaccaggttgttgcgtctgatttagatggcacgttactttctcccgaccatacgttatccccttacgccaaagaaactctgaagctgctcaccgcgcgcggcatcaactttgtgtttgcgaccggtcgtcaccacgttgatgtggggcaaattcgcgataatctggagattaagtcttacatgattacctccaatggtgcgcgcgttcacgatctggatggtaatctgatttttgctcataacctggatcgcgacattgccagcgatctgtttggcgtagtcaacgacaatccggacatcattactaacgtttatcgcgacgacgaatggtttatgaatcgccatcgcccggaagagatgcgcttttttaaagaagcggtgttccaatatgcgctgtatgagcctggattactggagccggaaggcgtcagcaaagtgttcttcacctgcgattcccatgaacaactgctgccgctggagcaggcgattaacgctcgttggggcgatcgcgtcaacgtcagtttctctaccttaacctgtctggaagtgatggcgggcggcgttagtaaaggccatgcgctggaagcggtggcgaagaaactgggctacagcctgaaggattgtattgcgtttggtgacgggatgaacgacgccgaaatgctgagcatggcggggaaaggctgcattatgggcagtgcgcaccagcgtctgaaagaccttcatcccgagctggaagtgattggtactaatgccgacgacgcggtgccgcattatctgcgtaaactctatttaagctaatcgttctttatttggtcagttgtcaacctgatacttcgctacaatggatacccgttaatcaaagagttttccattgtggcgctacttatcatcaccacgattctgtgggccttctcctttagcttttatggcgagtaccttgcggggcacgtcgatagctattttgcggtgctggtgcgcgttggcctggcggcactcgtttttctgccgtttctgcgtacccgtggcaatagcctgaaaacggtcggcctgtatatgctggtgggcgcgatgcagcttggcgtgatgtatatgctgagtttccgcgcttatctctacctgacggtttccgagctgctgctgttcaccgtgctgacgccgctctacatcacgctgatttatgacatcatgagtaagcgccgtctgcgctggggctatgcctttagcgccttgctggcggtgattggtgccgggattattcgctatgatcaggtcaccgaccatttctggactggcttgctgctggtgcaactctccaatatcacttttgccattggcatggtgggttacaaacgcctgatggaaactcgcccgatgccacagcataacgcctttgcgtggttctatcttggcgcgtttctggtggcagtgattgcatggttcttgctgggaaatgcgcagaaaatgccgcaaaccacgctgcaatggggcattctggtgtttcttggcgtggtggcttccgggattggctactttatgtggaactacggcgcgacgcaggtggacgccggaacgctgggcattatgaataatatgcacgttccggcagggctgctggtaaacctggctatctggcaccaacagccgcactggccaacgtttattacaggcgcgctggtgatcctggccagtctgtgggtgcatcgtaagtgggtcgctccgcgctctagtcaaacggcagatgatcgcaggcgtgattgcgcgctgagcgaataattacaggcgcgctggacttcctggcctcactgtgggtgcatcgtaagtgggtcgctccgcgctcttcacaaacggcagatgatcgcaggcgtgattgcgcgcactgcgaataaacgcttccgtaactggctgacgctgctcgccatcgcgcacggcggcgtacagtcggctccacaagccttcgcccagggttttggtcaccaccagaccctggcgctcaaaactctctactacccaatgcggtagcgcggcaatacccatccgcgcggcaaccatctgaatcaacaataaggtgttatcgacgcttttcagactcgggctgacgcctgccggctgaagaaaatgccgccagacatccagtcgactacgctgcaccggataaattaatagcgtctcgctggcgagatcttccggtgtaattcgcgttttcgccgccagtggatggtcaggtgctaacaccagacgcacttcatagtcgaacatcgggctataatgcaggccactgcgcggcagaatatcggacgtcattaccagatccagctctccctgttgcaaggcgggctgcgggtcaaatgtcacgccgcttttaaaatccatctctacctgcggccagttcttatggaaattttctaacgcgggtgtcagccactgaatacagctatggcactcaatggcaatgcgcagacgcgtctgctgcggttcattgcaggcttgcagggcctggctaatttgcggcagtacctggtttgccagttgcaacaggatttctccctgcggtgtaaagcgtagcggctggctcttacgcacaaatagccggaagccaaggcgttgttccagatcgctaaactggtgagacagggcggattgcgtctgatgcaacgtcgccgcagcggctgcgaggctgccgcagttccgcaacgcttgtagcgttttcaggtgttttacttcgatcatgaaagtccttcacttcggcatgaataatttgcgcttgaggaatatacagtaaccgccaattatggatgtgtaaacatctggacggctaaaatccttcgtcttttaaatttatggtgcgttggctgcgtttctccaccccggtcacttacttcagtaagctcccggggatgaataaacttgccgccttccctaaattcaaaatccataggatttacatataattagaggaagaaaaaatgacaatattgaatcacaccctcggtttccctcgcgttggcctgcgtcgcgagctgaaaaaagcgcaagaaagttattgggcggggaactccacgcgtgaagaactgctggcggtagggcgtgaattgcgtgctcgtcactgggatcaacaaaagcaagcgggtatcgacctgctgccggtgggcgattttgcctggtacgatcatgtactgaccaccagtctgctgctgggtaacgttccggcgcgtcatcagaacaaagatggtagcgtagatatcgacaccctgttccgtattggtcgtggacgtgcgccgactggcgaacctgcggcggcagcggaaatgaccaaatggtttaacaccaactatcactacatggtgccggagttcgttaaaggccaacagttcaaactgacctggacgcagctgctggacgaagtggacgaggcgctggcgctgggccacaaggtgaaacctgtgctgctggggccggttacctggctgtggctggggaaagtgaaaggtgaacaatttgaccgcctgagcctgctgaacgacattctgccggtttatcagcaagtgctggcagaactggcgaaacgcggcatcgagtgggtacagattgatgaacccgcgctggtactggaactaccacaggcgtggctggacgcatacaaacccgcttacgacgcgctccagggacaggtgaaactgctgctgaccacctattttgaaggcgtaacgccaaatctcgacacgattactgcgctgcctgttcagggtctgcatgttgacctcgtacatggtaaagatgacgttgctgaactgcacaagcgcctgccttctgactggttgctgtctgcgggtctgatcaatggtcgtaacgtctggcgcgccgatcttaccgagaaatatgcgcaaattaaggacattgtcggcaaacgtgatttgtgggtggcatcttcctgcagcttgctgcacagccccatcgacctgagcgtggaaacgcgtcttgatgcagaagtgaaaagctggtttgccttcgccctacaaaaatgccatgaactggcactgctgcgcgatgcgctgaacagtggtgacacggcagctctggcagagtggagcgccccgattcaggcacgtcgtcactctacccgcgtacataatccggcggtagaaaagcgtctggcggcgatcaccgcccaggacagccagcgtgcgaatgtctatgaagtgcgtgctgaagcccagcgtgcgcgttttaaactgccagcgtggccgaccaccacgattggttccttcccgcaaaccacggaaattcgtaccctgcgtctggatttcaaaaagggcaatctcgacgccaacaactaccgcacgggcattgcggaacatatcaagcaggccattgttgagcaggaacgtttgggactggatgtgctggtacatggcgaggccgagcgtaatgacatggtggaatactttggcgagcacctcgacggatttgtctttacgcaaaacggttgggtacagagctacggttcccgctgcgtgaagccaccgattgtcattggtgacattagccgcccggcaccgattaccgtggagtgggcgaagtatgcgcaaagcctgaccgacaaaccggtgaaagggatgctgacggggccggtgaccatactctgctggagcttcccgcgtgaagatgtcagccgtgaaaccatcgccaaacagattgcgctggcgctgcgtgatgaagtggccgatctggaagccgctggaattggcatcatccagattgacgaaccggcgctgcgcgaaggtttaccgctgcgtcgtagcgactgggatgcgtatctccagtggggcgtagaggccttccgtatcaacgccgccgtggcgaaagatgacacacaaatccacactcacatgtgttattgcgagttcaacgacatcatggatagcattgcggcgctggacgcagacgtcatcaccatcgaaaccagccgttccgacatggagttgctggagagctttgaagagtttgattatccaaatgaaatcggtcctggcgtctatgacattcacagcccaaacgtaccgagcgtggaatggattgaagccttgctgaagaaagcggcaaaacgcattccggcagagcgcctgtgggtcaacccggactgtggcctgaaaacgcgcggctggccagaaacccgcgcggcactggcgaacatggtgcaggcggcgcagaacttgcgtcgggggtaaaatccaaaccgggtggtaataccacccggtcttttctcattacaggctcttcttcccaccatactgcttaaaccattccagcatacgctgccagccatcttctgcagatgcggcatgatagctcgggcgataatcagcgttgaatgcatgcccggcgtccgggtacacgataatctctgctttcgcattagcagcccgcagcgcctggcgcatggtttcaacgctctcctgcggaatgctgttatcctgaccaccatataagccgagaatcggcgcgttaagatcggttgcgatatcaacaggttgtttcggactattcaggctcttgtcgcccgtcagtttgccgtaccacgccactgcggcttttagctgtggattatgcgcggcatacagccaggtgatacgtccaccccagcagaatccggtgatcattaaacgatgaacatcgccgccgttgcgggaagcccaactggcgacatgatcgagatcggccagcacctggctgtcaggcacttttgctaccagaccgctaagcaacgtggggatatcggcaaaatcattcggatcgccttcgcggaagtaaagttcaggtgcgatagccagatacccctccagcgccagacggcgacaaatgtcgcggatatgttcatgcacgccaaaaatttcctgcactacaatgaccactggcagtgggccatcgctttgctttggtctggcatggtaagcaggcatgttatccccttgactagggatagaggtgaagcccgccacaatcgcgtcgtccggggtctgaacgatggtgctagcgagagggcttgcagcaggtgcaaatccagattgttgtgttgttgccatggtattctccgtacccttataaaaatgttgcgcaatgttaactatagtcagcatgcaacaaatcacattgcctgaatcggctcatcttttatgcagtcctgcagaatgaagggtgatttatgtgatttgcatcacttttggtgggtaaatttatgcaacgcatttgcgtcatggtgatgagtatcacgaaaaaatgttaaacccttcggtaaagtgtctttttgcttcttctgactaaaccgattcacagaggagttgtatatgtccaagtctgatgtttttcatctcggcctcactaaaaacgatttacaaggggctacgcttgccatcgtccctggcgacccggatcgtgtggaaaagatcgccgcgctgatggataagccggttaagctggcatctcaccgcgaattcactacctggcgtgcagagctggatggtaaacctgttatcgtctgctctaccggtatcggcggcccgtctacctctattgctgttgaagagctggcacagctgggcattcgcaccttcctgcgtatcggtacaacgggcgctattcagccgcatattaatgtgggtgatgtcctggttaccacggcgtctgtccgtctggatggcgcgagcctgcacttcgcaccgctggaattcccggctgtcgctgatttcgaatgtacgactgcgctggttgaagctgcgaaatccattggcgcgacaactcacgttggcgtgacagcttcttctgataccttctacccaggtcaggaacgttacgatacttactctggtcgcgtagttcgtcactttaaaggttctatggaagagtggcaggcgatgggcgtaatgaactatgaaatggaatctgcaaccctgctgaccatgtgtgcaagtcagggcctgcgtgccggtatggtagcgggtgttatcgttaaccgcacccagcaagagatcccgaatgctgagacgatgaaacaaaccgaaagccatgcggtgaaaatcgtggtggaagcggcgcgtcgtctgctgtaattctcttctcctgtctgaaggccgacgcgttcggccttttgtatttttgcgtagcgcctcgcaggaaatgcctttccaactggacgtttgtacagcacaattctattttgtgcgggtaagttgttgcgtcaggaggcgttgtggatttcagtatcatggtttacgcagttattgcgttggtgggtgtggcaattggctggctgtttgccagttatcaacatgcgcagcaaaaagccgagcaattagctgaacgtgaagagatggtcgcggagttaagcgcggcaaaacaacaaattacccaaagcgagcactggcgtgcagagtgcgagttactcaataacgaagtgcgcagcctgcaaagtattaacacctctctggaggccgatctgcgtgaagtaaccacgcggatggaagccgcacagcaacatgctgacgataaaattcgccagatgattaacagcgagcagcgcctcagtgagcagtttgaaaacctcgccaaccgtatttttgagcacagcaatcgccgggttgatgagcaaaaccgtcagagtctgaacagcctgttgagcccgctacgtgaacaactggacggtttccgccgtcaggttcaggacagcttcggtaaagaagcacaagaacgccataccctgacccacgaaattcgcaatctccagcaactcaacgcgcaaatggcccaggaagcgatcaacctgacgcgcgcgctgaaaggcgacaataaaacccagggcaactggggcgaggtagtattgacgcgggtgttggaggcttccggtctgcgtgaagggtatgaatatgaaacccaggtcagcatcgaaaatgacgcccgcagccggatgcagccggatgtcatcgtgcgcctgccgcagggaaaagatgtggtgatcgacgccaaaatgacgctggtcgcctatgaacgctattttaacgccgaagacgactacacccgcgaaagcgcgctacaggaacatatcgcgagcgtgcgtaaccatatccgtttgctgggacgcaaagattatcaacagctgccggggctgcgaactctggattacgtgctgatgtttattcccgttgaacccgcttttttactggcgcttgaccgccagccggagctgatcaccgaagcgttgaaaaacaacatcatgctggttagcccgactacgctgctggtggcgctgcgcactatcgccaacctgtggcgttatgagcatcaaagccgcaacgcccagcaaatcgccgatcgtgccagcaagctgtacgacaagatgcgtttgttcatcgatgacatgtccgcgattggtcaaagtctcgacaaagcgcaggataattatcggcaggcaatgaaaaaactctctagtgggcgcggaaatgtgctggcgcaggcagaagcgtttcgcggtttaggagtagaaattaaacgcgagattaatccggatttggctgaacaggcggtgagccaggatgaagagtatcgacttcggagcgttccggagcagccgaatgatgaagcttatcaacgcgatgatgaatataatcagcagagccgctaacccattgggagtagttaagccgggtagaaatctagggcatcgacgcccaatctgttacacttctggaacaattttttgatgagcaggcattgagatggtggataagagtcaagaaacgacgcactttggttttcagaccgtcgcgaaggaacaaaaagcggatatggtcgcccacgttttccattccgtggcaagtaaatacgatgtcatgaatgatttgatgagttttggtattcatcgtttgtggaagcgattcacgattgattgcagcggcgtacgccgtgggcagaccgtgctggatctggctggtggcaccggcgacctgacagcgaaattctcccgcctggtcggagaaactggcaaagtggtccttgctgatatcaatgaatccatgctcaaaatgggccgcgagaagctgcgtaatatcggtgtgattggcaacgttgagtatgttcaggcgaacgctgaggcgctgccgttcccggataacacctttgattgcatcaccattagctttggtctgcgtaacgtcaccgacaaagataaagcactgcgtagtatgtatcgcgtgctgaaacccggcggccgcctgctggtgcttgagttcagcaagccaattatcgagccgctgagcaaagcctatgatgcatactccttccatgtgctgccgcgtattggcagtctggtcgcgaacgacgccgacagctaccgttatctggcagaatccatccgtatgcatcccgatcaggataccctgaaagccatgatgcaggatgccggattcgaaagtgtcgactactacaatctgacggcaggggttgtggcgctgcatcgtggttataagttctgacaggagaccggaaatgccttttaaacctttagtgacggcaggaattgaaagtctgctcaacaccttcctgtatcgcagtcccgcgctgaaaacggcccgcagccgtctgctgggtaaagtattgcgcgtggaggtaaaaggctttagcacgagtttgattctggtgttcagcgaacgccaggttgatgtactgggcgaatgggcaggcgatgctgactgcaccgttatcgcctacgccagtgtgttgccgaaacttcgcgatcgccagcagcttaccgcactgattcgcagtggtgagctggaagtgcagggcgatattcaggtggtgcaaaacttcgttgcgctggcagatctggcagagttcgaccctgcggaactgctggccccttataccggtgatatcgccgctgaaggaatcagcaaagccatgcgcggaggcgcaaagttcctgcatcacggcattaagcgccagcaacgttatgtggcggaagccattactgaagagtggcgtatggcacccggtccgcttgaagtggcctggtttgcggaagagacggctgccgtcgagcgtgctgttgatgccctgaccaaacggctggaaaaactggaggctaaatgacgccaggtgaagtacggcgcctatatttcatcattcgcacttttttaagctacggacttgatgaactgatccccaaaatgcgtatcaccctgccgctacggctatggcgatacagtttattctggatgccaaatcggcataaagacaaacttttaggtgagcgactacgactggccctgcaagaactggggccggtttggatcaagttcgggcaaatgttaagtacccgccgcgatctttttccaccgcatattgccgatcagctggcgttattgcaggacaaagttgctccgtttgatggcaagctggcgaagcagcagattgaagctgcaatgggcggcttgccggtagaagcgtggtttgacgattttgaaatcaagccgctggcttctgcttctatcgcccaggttcataccgcgcgattgaaaagcaatggtaaagaggtggtgattaaagtcatccgcccggatattttgccggttattaaagcggatctgaaacttatctaccgtctggctcgctgggtgccgcgtttgctgccggatggtcgccgtctgcgcccaaccgaagtggtgcgcgagtacgaaaagacattgattgatgaactgaatttgctgcgggaatctgccaacgccattcagcttcggcgcaattttgaagacagcccgatgctctacatcccggaagtttaccctgactattgtagtgaagggatgatggtgatggagcgcatttacggcattccggtgtctgatgttgcggcgctggagaaaaacggcactaacatgaaattgctggcggaacgcggcgtgcaggtgttcttcactcaggtctttcgcgacagctttttccatgccgatatgcaccctggcaacatcttcgtaagctatgaacacccggaaaacccgaaatatatcggcattgattgcgggattgttggcagcctaaacaaagaagataaacgctatctggcagaaaactttatcgccttctttaatcgcgactatcgcaaagtggcagagctacacgtcgattctggctgggtgccaccagataccaacgttgaagagttcgaatttgccattcgtacggtctgtgaacctatctttgagaaaccgctggccgaaattagctttggacatgtactgttaaatctgtttaatacggcgcgtcgcttcaatatggaagtgcagccgcaactggtgttactccagaaaaccctgctctacgtcgaaggggtaggacgccagctttatccgcaactcgatttatggaaaacggcgaagcctttcctggagagctggattaaagatcaggtcggtattcctgcgctggtgagagcatttaaagaaaaagcgccgttctgggtcgaaaaaatgccagaactgcctgaattggtttacgacagtttgcgccagggcaagtatttacagcacagtgttgataagattgcccgcgagcttcagagtaatcatgtacgtcagggacaaagccgttattttctcggaattggcgctacgttagtattaagtggcacattcttgttggtcagccgacctgaatgggggctgatgcccggctggttaatggcaggtggtctgatcgcctggtttgtcggttggcgcaaaacacgctgattttttcatcgctcaaggcgggccgtgtaacgtataatgcggctttgtttaatcatcatctaccacagaggaacatgtatgggtggtatcagtatttggcagttattgattattgccgtcatcgttgtactgctttttggcaccaaaaagctcggctccatcggttccgatcttggtgcgagcatcaaaggctttaaaaaagcaatgagcgatgatgaaccaaagcaggataaaaccagtcaggatgctgattttactgcgaaaactatcgccgataagcaggcggatacgaatcaggaacaggctaaaacagaagacgcgaagcgccacgataaagagcaggtgtaatccgtgtttgatatcggttttagcgaactgctattggtgttcatcatcggcctcgtcgttctggggccgcaacgactgcctgtggcggtaaaaacggtagcgggctggattcgcgcgttgcgtagtctggcgacaacggtgcagaacgaactgacccaggagttaaaactccaggagtttcaggacagtctgaaaaaggttgaaaaggcgagcctcactaacctgacgcccgaactgaaagcgagcatggatgaactacgccaggccgcggagagcatgaagcgttcctacgttgcaaacgatcctgaaaaggcgagcgatgaagcgcacaccatccataacccggtggtgaaagataatgaagctgcgcatgagggcgtaacgcctgccgctgcacaaacgcaggccagtagcccggaacagaagccagaaaccacgccagagccggtggtaaaacctgctgcggacgctgaaccgaaaaccgctgcaccttcccctagcagcagtgataaaccgtaaacatgtctgtagaagatactcaaccgcttatcacgcatctgattgagctgcgtaagcgtctgctgaactgcattatcgcggtgatcgtgatattcctgtgtctggtctatttcgccaatgacatctatcacctggtatccgcgccattgatcaagcagttgccgcaaggtagtacgatgatcgccaccgacgtggccagcccgttctttacgccgatcaagctgacctttatggtgagcctgattctgagtgcgccggtgattctctatcaggtgtgggcatttatcgccccagcgctgtataagcatgaacgtcgcctggtggtgccgctgctggtttccagctctctgctgttttatatcggcatggcattcgcctactttgtggtctttccgctggcatttggcttccttgccaataccgcgccggaaggggtgcaggtatccaccgacatcgccagctatttaagcttcgttatggcgctgtttatggcgtttggtgtctcctttgaagtgccggtagcaattgtgctgctgtgctggatggggattaccagcccagaagacttacgcaaaaaacgcccgtatgtgctggttggtgcattcgttgtcgggatgttgctgacgccgccggatgtcttcagccaaacgctgttggcgatcccgatgtactgtctgtttgaaatcggtgtcttcttcagtcgcttttacgttggtaaagggcgaaatcgggaagaggaaaacgacgctgaagcagaaagcgaaaaaactgaagaataaattcaaccgcccgtcagggcggttgtcatatggagtacaggatgtttgatatcggcgttaatttgaccagtagccaatttgcgaaagaccgtgatgatgttgtagcgtgcgcttttgacgcgggagttaatgggctactcatcaccggcactaacctgcgtgaaagccagcaggcgcaaaagctggcgcgtcagtatagctcctgttggagtacggcgggcgtacatcctcacgacagcagccagtggcaagctgcgactgaagaagcgattattgagctggccgcgcagccagaagtggtggcgactggtgaatgtggtctcgactttaaccgcaactttagcacgccggaagagcaggaacgcgcttttgttgcccagctacgcattgccgcagatttaaacatgccggtatttatgcactgtcgcgatgcccacgagcggtttatgacattgctggagccgtggctggataaactgcctggtgcggttcttcattgctttaccggcacacgcgaagagatgcaggcgtgcgtggcgcatggaatttatatcggcattaccggttgggtttgcgatgaacgacgcggactggagctgcgggaacttttgccgttgattccggcggaaaaattactgatcgaaactgatgcgccgtatctgctccctcgcgatctcacgccaaagccaagttcccggcgcaacgagccagcccatctgccccatattttgcaacgtattgcgcactggcgtggagaagatgccgcatggctggctgccaccacggatgctaatgtcaaaacactgtttgggattgcgttttaaagtttgcggaactcggtattcttcacactgtgcttaatctctttattaataagattaagcaatagcatggagcgagcctcaccatcgggttcggtgaaaatggcctgaaagccttcgaacgcgccttcggtaataatcaccttatcacccggataaggggttgccggatcgacaatgtctttcggtttatatacgcttagctgatgaataaccgcgcttgggactatcgctgggctcgcgccaaagcgcacgaagtggctgacaccgcgggtcgcgttgatagtcgtggtatgaatcacttctgggtcaaattccacaaacaggtagttggggaacaatggctcactgactgcagtacgttttccacgcacgattttttccagggtgatcatcggtgccaggcaattcacagcctgtctttcgaggtgttcctgggcacgttgaagttgcccgcgcttgcagtacagtaaataccaggattgcataatgactcttatccgtttaatcggggcgcaaggatagcaaaagctttacgctaagttaattatattccccggtttgcgttataccgtcagagttcacgctaatttaacaaatttacagcatcgcaaagatgaacgccgtataatgggcgcagattaagaggctacaatggacgccatgaaatataacgatttacgcgacttcttgacgctgcttgaacagcagggtgagctaaaacgtatcacgctcccggtggatccgcatctggaaatcactgaaattgctgaccgcactttgcgtgccggtgggcctgcgctgttgttcgaaaaccctaaaggctacagtatgccggtgctgtgcaacctgttcggtacgccaaagcgcgtggcgatgggcatggggcaggaagatgttagcgcgctgcgtgaagttggtaaattattggcgtttctgaaagagccggagccgccaaaaggtttccgcgacctgtttgataaactgccgcagtttaagcaagtattgaacatgccgacaaagcggctgcgtggtgcgccctgccaacaaaaaatcgtctctggcgatgacgtcgatctcaatcgcattcccattatgacctgctggccggaagatgccgcgccgctgattacctgggggctgacagtgacgcgcggcccacataaagagcggcagaatctgggcatttatcgccagcagctgattggtaaaaacaaactgattatgcgctggctgagccatcgcggcggcgcgctggattatcaggagtggtgtgcggcgcatccgggcgaacgtttcccggtttctgtggcgctgggtgccgatcccgccacgattctcggtgcagtcactcccgttccggatacgcttagtgagtatgcgtttgccggattgctacgtggcaccaagaccgaagtggtgaagtgtatctccaatgatcttgaagtgcccgccagtgcggagattgtgctggaagggtatatcgaacaaggcgaaactgcgccggaagggccgtatggcgaccacaccggttactataatgaagtcgatagtttcccggtatttaccgtgacgcatattacccagcgtgaagatgcgatttaccattccacctataccgggcgtccgccagatgagcccgcggtgctgggtgtcgcactgaacgaagtgtttgtgccgattctgcaaaaacagttcccggaaattgtcgatttttacctgccgccggaaggctgctcttatcgcctggcggtagtgacaatcaaaaaacagtacgccggacacgcgaagcgcgtcatgatgggcgtctggagcttcttacgccagtttatgtacactaaatttgtgatcgtttgcgatgatgacgttaacgcacgcgactggaacgatgtgatttgggcgattaccacccgtatggacccggcgcgggatactgttctggtagaaaatacgcctattgattatctggattttgccagccctgtctccgggctgggtagtaaaatggggctggatgccacgaataaatggccgggggaaacccagcgtgaatggggacgtcccatcaaaaaagatccagatgttgtcgcgcatattgacgccatctgggatgaactggctatttttaacaacggtaaaagcgcctgatgcgcgtttgttttgccctatttatcgatccgacagagaaagcgcatgacaaccttaagctgtaaagtgaccagcgtagaagctatcacggataccgtatatcgtgtccgcatcgtgccagacgcggccttttcttttcgtgctggtcagtatttgatggtagtgatggatgagcgcgacaaacgtccgttcagtatggctagcacgccggatgaaaaagggtttatcgagctgcatattggcgcttctgaaatcaacctttacgcgaaagcagtcatggaccgcatcctcaaagatcatcaaatcgtggtcgacattccccacggagaagcgtggctgcgcgatgatgaagagcgtccgatgattttgattgcgggcggcaccgggttctcttatgcccgcagcattttgctgacagcgttggcgcgtaacccaaaccgtgatatcaccatttactggggcgggcgtgaagagcagcatctgtatgatctctgcgagcttgaggcgcttagcttgaagcatcctggtctgcaagtggtgccggtggttgaacaaccggaagcgggctggcgtgggcgtactggcaccgtgttaacggcggtattgcaggatcacggtacgctggcagagcatgatatctatattgccggacgttttgagatggcgaaaattgcccgcgatctgttttgcagtgagcgtaatgcgcgggaagatcgcctgtttggcgatgcgtttgcatttatctgagatataaaaaaacccgcccctgacaggcgggaagaacggcaactaaactgttattcagtggcatttagatctatgacgtatctggcaaaccatgcccgatgcgacgctgtcgcgtcttatcgtgcctacaaatagtccgaaccgtaggccggataaggcgtttacgccgcatccggcaattggtgcatgatgcctgatgcgacgctgtcgcgtcttatcgtgcctacaaatagtccgaaccgtaggccggataaggcgtttacgccgcatccggcaattggtgcatgatgcctgatgcgacgctggcgcgtcttatcaggcctacattggtgccggatcggtagaccggataaggcgttcacgccgcatccggcaagtggttaaacccgctcaaacaccgtcgcaataccctgacccagaccgatacacatcgtcgccagaccaaactgaacgtctttgcgttccatcagattcagcagcgtggtgctgatacgcgcaccggaacaacccagcggatgacccagcgcgatcgcgccaccgttgaggttgatcttctcgtcaatctgctcaattagtcccagatctttaatacatggcaggatctgcgcggcaaaggcttcgttcatttcaaacacgccgatatcgctggcagaaagccccgcttttttcagcgccagtttgctggccggaaccgggccgtaacccataatgcttgggtcacaaccaacgaccgccatgctacgcacacgagcgcgcggcttaagacctaattcatgggcgcggctttcactcatcaccagcatggcagctgcgccatcggaaagtgcagaagatgtgcccgccgttaccataccgtttactggatcaaacgccggacgcagcgtggcgagggcttccacggtggtttccgggcgaatcacttcgtcgtaattaaactgcttcaggacgccgtcggcatcgtgaccaccggtcgggatgatttcatttttaaatgcggcgctctgcgtggcggcccaggcgcgggcgtgactccgcgcggcaaaggcatcctgcatttcacggctgataccgtgcatacgcgccagcatttctgccgttaagcccatcatgcccgccgctttggcgacattgcggctcaggccggggtgaaaatcgacgccgtgactcatcggcacatggcccatatgctccacgccgccaaccagacatgcctgcgcatcgccagtcatgatcattcgtgctgcgtcatgcagtgcctgcatggaactaccacacaagcgattaacggtaaccgccgggacagagtgtggtacttctgccagcagcgccgcgttacgggcgatattaaaaccctgctccagcgtctgctgcacacaaccccagtaaatatcgtcgagggccgccgcttccagcgccgggttacgcgccagcaggctacgcattaaatgagcggagagatcttctgcacgcacgttacgaaaagcaccgcccttgctacggcccatcggggtgcgaattgcatcgacaatgacaacctgttccattgtgactccttaagccgttttcaggtcgccaaccggacgggctggctcaaccggaggatagtacggttcgttatgacgcgctttattacgcagaccttccggcacttcatacagcgggccgaggtgctgatattgctgtgccatatcgaggtattttgcgctaccgagggtgtccagccagcggaacgcgccgccgtggaacggagggaagcccaggccgtagaccagcgccatatccgcttccgccggagtggcgataatgccttcctccagacagcgcaccacttcgttgaccatcgggatcatcatgcgggcgataatctcttcttcgctgaagtcgcgcttcggctggctcacttctgccagcaggtcttcaacggcggcgtcttcttctttcttcggcttacctttgctgtcttctttataacgccagaaaccgaggccgttcttctgaccaaagcggttggcatcaaacagcgcgtcgatggcatcgcggtaatctttctgcatccgctgcgggaagcctgctgccatgacagcctgagcgtgatgcgcggtatcaatgcccacaacgtccagcagatatgccgggcccatcggccagccaaactgtttttccatcactttgtcgatcttgcggaaatccgcgccgtcgcgcagcagctggctgaaaccggcgaaatacgggaacagcacgcggttaacaaagaagccggggcagtcgttaaccacaatcggcgtcttgcccatcttgctcgcccaggcgacaactttcgcgatggtttcgtcggagcttttctcgccgcgaataatttctaccaacggcattcggtggaccgggttaaagaagtgcatcccgcagaagttttccgggcgttccagcgcgttggccagttcgctgataggaatggtactagtgttagacgccagcacggtatcctggcgtactttttgttcggtttctgccagtacggcttttttcactttcgggttttcaacaaccgcttctaccacaatatccacgcggtcaaatccggcgtagtcgagcgttgggtggattgtggagatcacgccagccagtttcagaccatcgatcttgccgcgctcaagctgcttgttcagcagtttcgcggcttcggtcatgccgagggttaagctcttgtcgttgatatctttcatgacaaccggcacgcctttccacgcagactggtaagcgatgccgccgcccataatgcctgcacccagcaccgcggcctgtttcggggtttcaacgtctttggtgagtttcttcgctttgccttttacatattgatcgttaaggaaaatgccgaccagtgcgcgggcttcgttggtatgcgccagcgggacaaaacttttgttttccaggtttaaggcttcttcacgaccaaaacgggccgcagcttcaatggtttttactgcggtgatgggggccggataatgtttccccgctgtttgtgcgaccatccctttagcgatggtgaagctcatggtggcttcaatcttgctcagttttagtggttccagcttcggctgacgttttgctttccagtcgaggtcgccgttaatggcctggcgtaaaaccgcctttgcgccttcaaccagtttttctgctttgactacgccatccaccagaccgattttcagcgcctgatccgcgccgacatctttaccggcggcaatgatttccagcgcactgtcagcgcccagcatacgtggcatacgtacagaaccgccaaagccaggcatgatgcccagtttggtttccggcagaccgatgcgcagatccggcgtcgccagacgataatcggtcgccagcacgcattcgcagccaccgcccagcgcatagccattgacggcagcaatggtcggcaccggcagatcttccaggcgattaaacacgctattggcaaagtgcagccactgacttaactgttcttcaggaacgaggaacagggacaaaaattcggtgatatcagcaccgacgataaaggctgctttgttgctacgcagcagcagcccttttagatcactttgctgttccagcacgccgatggcctcgccgaggctggcgacggtcgcagtgtcgagtttattaacactacctggggcatcaaataccagttcggcaatgccatcttccagccagtcaaggtacagggtgtcgcctttgtaaagcatgtcagtctcctgaatccgcaaggtgatctggtcgtaccagatgagtcgaagtgtgtattttgtgttaaaaatatgcaaacaaaagattaaagaaatgccgatctgatcacgctcggcagaaatcacgctctggatgaacgatgtgctaagatgcggagacttaaggtcaaaaaaacagaagggtaaaaaatggaaagtctggccagcctctataaaaatcatatagctaccttacaagaacggactcgcgatgcgctggcgcgcttcaagctggatgcgttacttattcactccggcgagctgttcaatgtttttctcgacgatcatccctatccgtttaaagtgaacccgcaattcaaagcgtgggtgccggtaactcaggtgccaaactgctggttgctggtggatggcgtgaacaagccgaaactgtggttctatctgccggttgattactggcacaacgtcgaaccgctgccgacctctttctggactgaagatgtggaagtgatcgcgctgccgaaagccgatggcattggtagcctgctgcctgctgcgcgcggcaatatcggttatatcggtccggtgccggaacgtgcgctgcaactgggtattgaggccagcaacatcaacccgaaaggggttatcgactacctgcattactatcgctccttcaaaactgagtacgaactggcctgtatgcgtgaagcgcagaaaatggcggtcaacggtcaccgcgcggcagaagaagcgttccgttctggcatgagcgagttcgatatcaacattgcctatctgaccgcgaccggtcatcgtgataccgacgtaccttacagcaacattgtggcgcttaacgaacacgctgcggtactgcattacaccaaactggaccatcaggcaccggaagagatgcgcagcttcctgctggatgccggggcagaatataacggctatgcggctgacctgacccgtacctggagcgcaaaaagtgacaacgactacgcgcagctggtgaaggacgttaatgatgaacaactggcgctgatcgccaccatgaaagcaggcgtcagctatgtggattaccacatccagttccatcagcgcatcgccaaactgctgcgtaaacatcaaatcatcaccgatatgagtgaagaagcgatggtcgaaaacgatcttaccgggccgtttatgccgcatggtatcggccatccgctgggcctgcaggtgcatgacgtcgctggttttatgcaggatgatagcggtacgcacctcgcggcaccggcaaaatatccgtacctgcgctgcacccgtattctccagccgggcatggtgttaaccatcgaaccgggtatctacttcatcgaaagcctactggcaccgtggcgtgaagggcagttcagcaagcacttcaactggcagaaaattgaagcactgaaaccgttcggcggcattcgtatcgaagacaacgtggtgatccacgaaaacaacgtggaaaacatgacccgggatctgaaactggcgtgatggaaagctggttaattcctgcggcaccggtcacggtcgttgaagagatcaaaaagagccgcttcataacgatgttggcgcataccgatggcgttgaggcggcgaaagcgtttgttgaaagcgtgcgggcagaacaccccgatgcccggcaccattgcgtggcgtgggtcgcgggtgcgccggatgattctcaacagctgggtttctctgacgacggggagccggcgggaacggcaggtaaaccgatgctcgcccagctaatgggcagcggcgtcggggaaattaccgctgtggtagtgcgctactacggcggcatattgcttggcaccggtgggttagtgaaagcgtatggcggcggcgtgaatcaggcgctgcgccagctaacgacccaacgcaagacgccattaaccgaatatactttgcaatgtgaatatcatcagttaaccggcattgaagcgttgctggggcagtgtgacggcaaaattatcaacagtgattatcaggcattcgttctgctgcgggtggcgcttccggcggcgaaagtggctgaattttccgcaaagctggcggattttagccgtggtagtttgcaattgttagcgattgaagaataatccccacttcgttttgcagaactaaggaagcggcagagatgcattttcgcgccattacccgaatcgttggactactggtcatcttatttagtgggaccatgattatccctgggctggtagcactcatctaccgggatggagcgggccgcgcttttacccagaccttttttgtcgccctcgccattggctctatgctgtggtggccgaaccgcaaagagaaaggcgaacttaaatcccgtgaggggtttctgatagtggtgctgttctggaccgtgctgggtagcgtcggtgcgctcccttttatcttcagcgaaagcccgaacctcacgattaccgatgcgttttttgaatctttctctggcctgaccactacgggagccactacgctggtggggctggatagcctccctcacgccatcctcttttatcgccagatgctgcaatggtttggcgggatggggatcatcgtgttggcggttgcgatactgcctatcctcggcgtgggtgggatgcagctctatcgcgcagaaatgcccggcccgctgaaagataacaaaatgcgcccgcgaattgcggaaacggcgaaaaccctgtggttgatttatgtcttgctgaccgtcgcctgtgcgctggcgttgtggtttgccggaatggatgcctttgatgccatcggccatagctttgcgactatcgctattggcggcttcagcacacatgatgccagtatcggttatttcgatagcccgactattaacactatcattgctatcttcctgctgatctccggctgtaactacggtctgcactttagtctgttaagtgggcgtagtctgaaggtttattggcgcgatccggaatttcgcatgtttatcggcgtacagtttacgctggtggttatttgtaccctcgtactgtggtttcataatgtctacagtagcgcgctgatgacaattaaccaggcgtttttccaggtggtgagcatggcgacaaccgccgggtttacaactgacagcattgcccgctggccgctctttttgccggtactgcttttatgtagtgcctttatcggcggttgcgccgggagtacgggcggtggcctgaaggtgatccgcatcctgctgctgtttaagcaggggaaccgtgagctgaaacgactggtgcatccgaacgccgtctatagcattaagctggggaatcgcgcactgccggaacgtatcctcgaagccgtttggggatttttctccgcctatgcattggtgtttattgtcagtatgctggcgattatcgccacgggcgtggatgacttttctgcctttgcgagcgttgttgcgacattgaataacctggggccagggcttggcgtggttgctgataactttaccagtatgaacccggtggctaaatggatcctgattgccaacatgctgtttggtcgtctcgaggtctttacattgctggtgctctttaccccgactttctggcgtgaatgatggagtaatacgtgaaaacattaattcttttcagtacaagggacggacaaacgcgcgagattgcctcctacctggctagcgaactgaaagaactggggatccaggcggatgtcgccaatgtgcaccgcattgaagaaccacagtgggaaaactatgaccgtgtggtcattggtgcttctattcgctatggtcactaccatagtgcgttccaggaatttgtcaaaaaacatgcgacgcggctgaatagcatgccgagcgccttttactccgtgaatctggtggcgcgcaaaccggagaagcgtactccacagaccaacagctacgcgcgcaagtttctgatgaacagccaatggcgtcccgatcgctgcgcggtcattgccggggcgctgcgttacccacgttatcgctggtacgaccgttttatgatcaagctgattatgaagatgagtggcggtgaaacggatacgcgcaaagaagttgtctataccgattgggagcaggtggcgaatttcgcccgagaaatcgcccatttaaccgacaaaccgacgctgaaataagcataaagaataaaaaatgcgcggtcagaaaattattttaaatttcctcttgtcaggccggaataactccctataatgcgccaccactgacacggaacaacggcaaacacgccgccgggtcagcggggttctcctgagaactccggcagagaaagcaaaaataaatgcttgactctgtagcgggaaggcgtattatgcacaccccgcgccgctgagaaaaagcgaagcggcactgctctttaacaatttatcagacaatctgtgtgggcactcgaagatacggattcttaacgtcgcaagacgaaaaatgaataccaagtctcaagagtgaacacgtaattcattacgaagtttaattctttgagcgtcaaacttttaaattgaagagtttgatcatggctcagattgaacgctggcggcaggcctaacacatgcaagtcgaacggtaacaggaagaagcttgcttctttgctgacgagtggcggacgggtgagtaatgtctgggaaactgcctgatggagggggataactactggaaacggtagctaataccgcataacgtcgcaagaccaaagaggggtaccttcgggcctcttgccatcggatgtgcccagatgggattagctagtaggtggggtaacggctcacctaggcgacgatccctagctggtctgagaggatgaccagccacactggaactgagacacggtccagactcctacgggaggcagcagtggggaatattgcacaatgggcgcaagcctgatgcagccatgccgcgtgtatgaagaaggccttcgggttgtaaagtactttcagcggggaggaagggagtaaagttaatacctttgctcattgacgttacccgcagaagaagcaccggctaactccgtgccagcagccgcggtaatacggagggtgcaagcgttaatcggaattactgggcgtaaagcgcacgcaggcggtttgttaagtcagatgtgaaatccccgggctcaacctgggaactgcatctgatactggcaagcttgagtctcgtagaggggggtagaattccaggtgtagcggtgaaatgcgtagagatctggaggaataccggtggcgaaggcggccccctggacgaagactgacgctcaggtgcgaaagcgtggggagcaaacaggattagataccctggtagtccacgccgtaaacgatgtcgacttggaggttgtgcccttgaggcgtggcttccggagctaacgcgttaagtcgaccgcctggggagtacggccgcaaggttaaaactcaaatgaattgacgggggcccgcacaagcggtggagcatgtggtttaattcgatgcaacgcgaagaaccttacctggtcttgacatccacggaagttttcagagatgagaatgtgccttcgggaaccgtgagacaggtgctgcatggctgtcgtcagctcgtgttgtgaaatgttgggttaagtcccgcaacgagcgcaacccttatcctttgttgccagcggtccggccgggaactcaaaggagactgccagtgataaactggaggaaggtggggatgacgtcaagtcatcatggcccttacgaccagggctacacacgtgctacaatggcgcatacaaagagaagcgacctcgcgagagcaagcggacctcataaagtgcgtcgtagtccggattggagtctgcaactcgactccatgaagtcggaatcgctagtaatcgtggatcagaatgccacggtgaatacgttcccgggccttgtacacaccgcccgtcacaccatgggagtgggttgcaaaagaagtaggtagcttaaccttcgggagggcgcttaccactttgtgattcatgactggggtgaagtcgtaacaaggtaaccgtaggggaacctgcggttggatcacctccttaccttaaagaagcgttctttgaagtgctcacacagattgtctgatgaaaatgagcagtaaaacctctacaggcttgtagctcaggtggttagagcgcacccctgataagggtgaggtcggtggttcaagtccactcaggcctaccaaatttgcacggcaaatttgaagaggttttaactacatgttatggggctatagctcagctgggagagcgcctgctttgcacgcaggaggtctgcggttcgatcccgcatagctccaccatctctgtagtgattaaataaaaaatacttcagagtgtacctgcaaaggttcactgcgaagttttgctctttaaaaatctggatcaagctgaaaattgaaacactgaacaacgaaagttgttcgtgagtctctcaaattttcgcaacacgatgatgaatcgaaagaaacatcttcgggttgtgaggttaagcgactaagcgtacacggtggatgccctggcagtcagaggcgatgaaggacgtgctaatctgcgataagcgtcggtaaggtgatatgaaccgttataaccggcgatttccgaatggggaaacccagtgtgtttcgacacactatcattaactgaatccataggttaatgaggcgaaccgggggaactgaaacatctaagtaccccgaggaaaagaaatcaaccgagattcccccagtagcggcgagcgaacggggagcagcccagagcctgaatcagtgtgtgtgttagtggaagcgtctggaaaggcgtgcgatacagggtgacagccccgtacacaaaaatgcacatgctgtgagctcgatgagtagggcgggacacgtggtatcctgtctgaatatggggggaccatcctccaaggctaaatactcctgactgaccgatagtgaaccagtaccgtgagggaaaggcgaaaagaaccccggcgaggggagtgaaaaagaacctgaaaccgtgtacgtacaagcagtgggagcacgcttaggcgtgtgactgcgtaccttttgtataatgggtcagcgacttatattctgtagcaaggttaaccgaataggggagccgaagggaaaccgagtcttaactgggcgttaagttgcagggtatagacccgaaacccggtgatctagccatgggcaggttgaaggttgggtaacactaactggaggaccgaaccgactaatgttgaaaaattagcggatgacttgtggctgggggtgaaaggccaatcaaaccgggagatagctggttctccccgaaagctatttaggtagcgcctcgtgaattcatctccgggggtagagcactgtttcggcaagggggtcatcccgacttaccaacccgatgcaaactgcgaataccggagaatgttatcacgggagacacacggcgggtgctaacgtccgtcgtgaagagggaaacaacccagaccgccagctaaggtcccaaagtcatggttaagtgggaaacgatgtgggaaggcccagacagccaggatgttggcttagaagcagccatcatttaaagaaagcgtaatagctcactggtcgagtcggcctgcgcggaagatgtaacggggctaaaccatgcaccgaagctgcggcagcgacactatgtgttgttgggtaggggagcgttctgtaagcctgtgaaggtgtgctgtgaggcatgctggaggtatcagaagtgcgaatgctgacataagtaacgataaagcgggtgaaaagcccgctcgccggaagaccaagggttcctgtccaacgttaatcggggcagggtgagtcgacccctaaggcgaggccgaaaggcgtagtcgatgggaaacaggttaatattcctgtacttggtgttactgcgaaggggggacggagaaggctatgttggccgggcgacggttgtcccggtttaagcgtgtaggctggttttccaggcaaatccggaaaatcaaggctgaggcgtgatgacgaggcactacggtgctgaagcaacaaatgccctgcttccaggaaaagcctctaagcatcaggtaacatcaaatcgtaccccaaaccgacacaggtggtcaggtagagaataccaaggcgcttgagagaactcgggtgaaggaactaggcaaaatggtgccgtaacttcgggagaaggcacgctgatatgtaggtgaagcgacttgctcgtggagctgaaatcagtcgaagataccagctggctgcaactgtttattaaaaacacagcactgtgcaaacacgaaagtggacgtatacggtgtgacgcctgcccggtgccggaaggttaattgatggggttagccgcaaggcgaagctcttgatcgaagccccggtaaacggcggccgtaactataacggtcctaaggtagcgaaattccttgtcgggtaagttccgacctgcacgaatggcgtaatgatggccaggctgtctccacccgagactcagtgaaattgaactcgctgtgaagatgcagtgtacccgcggcaagacggaaagaccccgtgaacctttactatagcttgacactgaacattgagccttgatgtgtaggataggtgggaggctttgaagtgtggacgccagtctgcatggagccgaccttgaaataccaccctttaatgtttgatgttctaacgttgacccgtaatccgggttgcggacagtgtctggtgggtagtttgactggggcggtctcctcctaaagagtaacggaggagcacgaaggttggctaatcctggtcggacatcaggaggttagtgcaatggcataagccagcttgactgcgagcgtgacggcgcgagcaggtgcgaaagcaggtcatagtgatccggtggttctgaatggaagggccatcgctcaacggataaaaggtactccggggataacaggctgataccgcccaagagttcatatcgacggcggtgtttggcacctcgatgtcggctcatcacatcctggggctgaagtaggtcccaagggtatggctgttcgccatttaaagtggtacgcgagctgggtttagaacgtcgtgagacagttcggtccctatctgccgtgggcgctggagaactgaggggggctgctcctagtacgagaggaccggagtggacgcatcactggtgttcgggttgtcatgccaatggcactgcccggtagctaaatgcggaagagataagtgctgaaagcatctaagcacgaaacttgccccgagatgagttctccctgactccttgagagtcctgaaggaacgttgaagacgacgacgttgataggccgggtgtgtaagcgcagcgatgcgttgagctaaccggtactaatgaaccgtgaggcttaaccttacaacgccgaaggtgttttggcggattgagagaagattttcagcctgatacagattaaatcagaacgcagaagcggtctgataaaacagaatttgcctggcggcagtagcgcggtggtcccacctgaccccatgccgaactcagaagtgaaacgccgtagcgccgatggtagtgtggggtctccccatgcgagagtagggaactgccaggcatcaaataaaacgaaaggctcagtcggaagactgggcctttcgttttatctgttgtttgtcggtgaacgctctcctgagtaggacaaatccgccgggagcggatttgaacgttgcgaagcaacggcccggagggtggcgggcaggacgcccgccataaactgccaggcatcaaattaagcagaaggccatcctgacggatggcctttttgcattggcgcagaaaaaaatgccggatgcgacgctggcgcgtcttatccagcctactcttgcttatccgttctgcttttgcatccactccaccacaaaatcagccagcccctcaacatcattaatatccagtaatgcgacatcaagattaagcggcacatcactggctacagcaataacatgcctgtctatcactaattcttcaggtcgatgtccggctccatcgcgaaacagcacaatctttgcgatctcttcatgcttaaacccttcgaccagaatcaaatccagcttactggtatccattcgacttgcgagaaactgtagatccagctcttcttcgtctggtgtttccgtcatcaaggcccatcgttgctggctggcaacgatggtttgtaccgcgccagccttgcgcagctcatagctatctttgcctggcttatcaacatccatatcatggtgcgtatgcttaatcagccctggacggatccctctggcgcataatgccgggatcagttttttcaaaagcgtagtttttccggtaccactccacgcggcaaaggcgagtaacggtatcatcgtttttcctgccatcgggcaagctcctctggcgtattcacgttaacaaatgcatctttatgatcgctgaaatcaaccgcatgaccgccagccagacgcataaataccattacccggcgttctcctgcttgcagatattccagtaataaaggctcaatagcgcggtttaccagagcaatagtcgggtgatcgcgttcaccgtcatggacccacacgacaggcgcatctttgcgctgatgattaagcctggctgctaaatcagggggaatgtaaggcgtatcgcacgggcaaaacaaaaaccactcaccagcttcctgctgcattacactaagcattcctgccagagggcctgggtaatccgccagactatcttcaatcactttcagaccgcttgcctgatagatttcctgatgacgattagcattaaccacgacgtgagagagctgcgtcataagcgcgtcagcgacatgttgccataatggtttgccgtttaattcaagcaatcctttatctacgccgcccattcgtctggctttaccgcctgccagcacaacgcctgttatcgtcgtcatcagattcaccgatatcgcctcttttattgtgggattgaccctgctaacgtgtctgtctcaagagtaaggagcatcactatgaaatgtaaacgtctgaatgaagttattgaactcctccagccagcctggcaaaaagagccagaccttaacctgctgcaatttttgcagaaactggcgaaagagagtggttttgacggcgaactggcggatttgacggatgacattctgatctatcacctgaaaatgcgtgattccgcgaaagatgcggtgatcccgggtttgcagaaagattatgaagaagacttcaaaacggcgctgttacgcgctcgcggcgtaattaaagagtaaaagcttgtaagcggcgccaccaaaatcatcgtgaaatgatatccttcgtcattcgtaatgttttccggatgatgggatgaataacagcgcttttactttccagacactacacccggataccatcatggacgctctgtttgagcatgggatccgggtggattccggtcttaccccgcttaacagctatgaaaaccgtgtctatcaatttcaggacgaagatcgtcgacgttttgtcgtcaaattttatcgccctgaacgttggacagccgatcaaatcctcgaagaacatcaatttgcgttgcagctggtaaatgatgaagttccggtcgcagcacctgtggcctttaacggtcagactttattgaatcatcagggattttatttcgctgtttttccaagcgtcggtggtcgccagttcgaagctgataatatcgatcagatggaagcggttgggcgttatttagggcgtatgcaccagacggggcgcaaacagctttttatccatcgcccgaccatcggtttgaacgaatatctcattgagccacgcaagctgtttgaggacgctacactgataccttccgggttgaaagcggcattcctgaaagcgacagatgagctgattgccgccgttacagcacactggcgggaagatttcaccgttctgcggctacatggagactgccacgccgggaatattctctggcgcgatggtccaatgtttgttgatctggatgatgcacgtaatggtccagccgttcaggatttgtggatgttgctcaatggcgataaagccgagcagcggatgcaactggaaactattattgaagcttatgaagaatttagcgagttcgacaccgctgaaatcggactgattgaacctttacgcgccatgcgtttggtttattatcttgcctggctaatgcggcgttgggctgatcccgcgttcccgaaaaatttcccgtggttaaccggggaagattactggctgcgacagacggcgacttttatagaacaggcaaaagttctacaagaaccccctttgcaattaacacctatgtattaatcggagagagtagatcatgaaaaagatttggctggcgctggctggtttagttttagcgtttagcgcaagcgcggcgcagtatgaagatggtaaacagtacactaccctggaaaaaccggtagctggcgcgccgcaagtgctggagtttttctctttcttctgcccgcactgctatcagtttgaagaagttctgcatatttctgataatgtgaagaaaaaactgccggaaggcgtgaagatgactaaataccacgtcaacttcatgggtggtgacctgggcaaagatctgactcaggcatgggctgtggcgatggcgctgggcgtggaagacaaagtgactgttccgctgtttgaaggcgtacagaaaacccagaccattcgttctgcttctgatatccgcgatgtatttatcaacgcaggtattaaaggtgaagagtacgacgcggcgtggaacagcttcgtggtgaaatctctggtcgctcagcaggaaaaagctgcagctgacgtgcaattgcgtggcgttccggcgatgtttgttaacggtaaatatcagctgaatccgcagggtatggataccagcaatatggatgtttttgttcagcagtatgctgatacagtgaaatatctgtccgagaaaaaataattcaatgtaaattacataaagcccgtgaatattcacgggctttttttattatttaataaatataaatacattctgataatgcatcctgccgctggacattatttcagcataagtggatattcaaagttttgctgttttatcagggaatatttatatgatacgtaagagtgctacaggtgttattgttgcgttagccgtaatctggggtggtggcacatggtacacaggtacgcaaattcagcctggtgtcgaaaaatttattaaagattttaacgatgctaaaaagaaaggtgaacatgcctacgatatgacgttaagttatcaaaattttgacaaaggcttttttaattcccgttttcaaatgcaaatgacattcgataacggtgcacccgatctcaatatcaagccaggccagaaagttgtatttgatgtggatgttgagcacggtccgttgcccatcacaatgttaatgcatggtaatgtcatcccagcactggcagcggcaaaagtgaacttagtgaataatgaactgacacaaccgctatttatcgccgcgaaaaataaaagccccgtggaagcgacattgcgattcgcgtttggtggcagtttctctacgacattagatgttgcccctgcagagtatggaaagttttcttttggtgagggccagtttacttttaatggtgatggtagtagtttgtctaacctggatattgaaggcaaagtcgaagatattgttctgcaattaagtccaatgaacaaagtaacggcaaaaagttttaccattgattctctggcgcgattagaagaaaagaaatttccggttggtgaaagcgagagcaaatttaatcagattaacattatcaatcacggggaagacgttgcccaaatcgatgctttcgttgcaaaaaccaggctggatcgcgttaaagacaaagattatatcaatgtcaatctcacctacgaacttgataagttaacaaaagggaatcagcaactcggtagtggtgagtggagtttgattgctgaatctattgatcccagtgcagtgcgccaatttatcatccagtataacattgcgatgcagaagcagcttgctgcacaccctgagttagcaaacgatgaagttgctctgcaagaagtgaatgctgcattgttcaaagagtatttaccgttattacaaaaaagtgagccgaccattaaacaaccggtaagatggaagaacgcactcggcgaactaaatgccaatctggatatcagtattgccgacccagccaaatctagtagttccacaaacaaagatatcaaaagcctcaattttgatgtgaagttaccgcttaatgtcgtcacagaaaccgcaaaacagcttaatttatctgaaggaatggatgcggaaaaagcgcaaaagcaggctgataaacaaatcagcgggatgatgacattaggtcagatgtttcagttaatcacgattgacaacaataccgccagcctgcagctgcgttatacaccgggtaaagttgtttttaacggacaggagatgagcgaagaagaatttatgtctcgtgccggacgttttgttcattaaaatactcactcgcctctgctcattcagaggcgagtaaaacttacttattctgacgctgactactcatgagagacgtcagaagccggtctttttcctgccacaaactgttcagccattgctgaaaatggcgcttaaagcttttgtcattgatgtagtcgccatgtaactcatcggcaataggctgtaaatccacatgtacgacaatccgcgtcagtttaccgcttaacatatcgaagaacggctgacggttattgtccggataacacagcgtaacattaagcagtttatcgaattgtttacccagtacatttagcgccatcgcaatgcctgccgcctttggtggcaacaagttttgaaaagtggagtgggtttgctgatgtttttcttgcgtgaaacgggagccttcaacgaaattgacaatggtggtgggatgcaggcgaaacttttcacaagaacgccgagtggtttcaacatctttaccacgtcgctccggatgacgtaataaataagcgcgggaataacgcttcataaacggcatatccaggctccagcacgccaggccaagaaatggcacccaggccagctgttgcttgaggaaatatttattcatcggaatgtgcttacgaaacagcacgcacagtacgacaacatctgcccaactacggtggttacaaataagcagataccagttcttcttacttaacccttccagcccgtgaacttcccattgaaggtgtgggttcagatgcagtaataccgccagaccttcacaccagcaatacatcataaaatcacaaaaacggctaacctttcgccaaatgactggcacaggtagcaatagttttacaatcccggcaatgatgatcgggacggaacaaaaaatagtgaccaaaatggtcaatacgatactcagcaaaagggttatcgcagcgagtattctcgtcataatgaatttattcaaaaggttagccatagacagtgcgctaaagaagcgcaaggcgcagattttagcagaaaacgacccaaataacggatgatccttaaggagaaaaataattcatatctatccacattagaaaaaatcccattatctcaattattagggatggatttatttttaactgcatgaaaaacaaagacaaacatcatgctgtaaaaagcatgataataaattaaaagcgatgtaaataatttatgcacaaagttatccacatgacgatttgcgagcgatccagaagatctacaaaagattttcacgaaaagcggtgaaaaactcatgttttcatcctgtctgtggcatcctttacccataatctgataaacaggcacggacattatggttcagatcccccaaaatccacttatccttgtagatggtagttcttatctttatcgcgcatatcacgcgtttcccccgctgactaacagcgcaggcgagccgaccggtgcgatgtatggtgtcctcaacatgctgcgcagtctgatcatgcaatataaaccgacgcatgcagcggtggtctttgacgccaagggaaaaacctttcgtgatgaactgtttgaacattacaaaagtcatcgcccgccaatgccggacgatctgcgtgcacaaatcgaacccttgcacgcgatggttaaagcgatgggactgccgctgctggcggtttctggcgtagaagcggacgacgttatcggtactctggcgcgcgaagccgaaaaagccgggcgtccggtgctgatcagcactggcgataaagatatggcgcagctggtgacgccaaatattacgcttatcaataccatgacgaataccatcctcggaccggaagaggtggtgaataagtacggcgtgccgccagaactgatcatcgatttcctggcgctgatgggtgactcctctgataacattcctggcgtaccgggcgtcggtgaaaaaaccgcgcaggcattgctgcaaggtcttggcggactggatacgctgtatgccgagccagaaaaaattgctgggttgagcttccgtggcgcgaaaacaatggcagcgaagctcgagcaaaacaaagaagttgcttatctcagttaccagctggcgacgattaaaaccgacgttgaactggagctgacctgtgaacaactggaagtgcagcaaccggcagcggaagagttgttggggctgttcaaaaagtatgagttcaaacgctggactgctgatgtcgaagcgggcaaatggttacaggccaaaggggcaaaaccagccgcgaagccacaggaaaccagtgttgcagacgaagcaccagaagtgacggcaacggtgatttcttatgacaactacgtcaccatccttgatgaagaaacactgaaagcgtggattgcgaagctggaaaaagcgccggtatttgcatttgataccgaaaccgacagccttgataacatctctgctaacctggtcgggctttcttttgctatcgagccaggcgtagcggcatatattccggttgctcatgattatcttgatgcgcccgatcaaatctctcgcgagcgtgcactcgagttgctaaaaccgctgctggaagatgaaaaggcgctgaaggtcgggcaaaacctgaaatacgatcgcggtattctggcgaactacggcattgaactgcgtgggattgcgtttgataccatgctggagtcctacattctcaatagcgttgccgggcgtcacgatatggacagcctcgcggaacgttggttgaagcacaaaaccatcacttttgaagagattgctggtaaaggcaaaaatcaactgacctttaaccagattgccctcgaagaagccggacgttacgccgccgaagatgcagatgtcaccttgcagttgcatctgaaaatgtggccggatctgcaaaaacacaaagggccgttgaacgtcttcgagaatatcgaaatgccgctggtgccggtgcttagtcgcattgaacgtaacggtgtgaagatcgatccgaaagtgctgcacaatcattctgaagagctcacccttcgtctggctgagctggaaaagaaagcgcatgaaattgcaggtgaggaatttaacctttcttccaccaagcagttacaaaccattctctttgaaaaacagggcattaaaccgctgaagaaaacgccgggtggcgcgccgagtacgagcgaagaggtactggaagaactggcgctggactatccgttgccaaaagtgattctggagtatcgtggtctggcgaagctgaaaagcacctacaccgacaagctgccgctgatgatcaacccgaaaaccgggcgtgtgcatacctcttatcaccaggcagtaactgcaacgggacgtttaagcagtaccgatcctaacctgcaaaacattccggtgcgtaacgaagaaggtcgtcgtatccgccaggcgtttattgcgccagaggattatgtgattgtcagtgcggactacagccagattgaactgcgcattatggcgcatcttagccgtgacaaaggcttgctgaccgcattcgcggaaggaaaagatatccaccgggcaacggcggcagaagtgtttggtttgccactggaaaccgtcaccagcgagcaacgccgtagcgcgaaagcgatcaactttggtctgatttatggcatgagtgctttcggtctggcgcggcaattgaacattccacgtaaagaagcgcagaagtacatggacctttacttcgaacgctaccctggcgtgctggagtatatggaacgcacccgtgctcaggcgaaagagcagggctacgttgaaacgctggacggacgccgtctgtatctgccggatatcaaatccagcaatggtgctcgtcgtgcagcggctgaacgtgcagccattaacgcgccaatgcagggaaccgccgccgacattatcaaacgggcgatgattgccgttgatgcgtggttacaggctgagcaaccgcgtgtacgtatgatcatgcaggtacacgatgaactggtatttgaagttcataaagatgatgttgatgccgtcgcgaagcagattcatcaactgatggaaaactgtacccgtctggatgtgccgttgctggtggaagtggggagtggcgaaaactgggatcaggcgcactaagattcgcctgaacatgccttttttcgtaagtaagcaacataagctgtcacgttttgtgatggctattagaaattcctatgcaacaactgaaaaaaaattacaaaaagtgctttctgaactgaacaaaaaagagtaaagttagtcgcgtagggtacagaggtaagatgttctatctttcagaccttttacttcacgtaatcggatttggctgaatattttagccgccccagtcagtaatgactggggcgttttttattgggcgaaagaaaagatccgtaatgcctgatgcgctatgtttatcaggccaacggtagaattgtaatctattgaatttacgggccggatacgccacatccggcacaagcattaaggcaagaaaattattcgccgtcctgcgtttcttctacaggctgcatctcgctaaaccaggtatccagtttctgccgcagcttgtccacgccttgtttcttcaagctagaaaacgtttcaacctgcacatcaccgttaaacgccagtacagcttcacgcaccatattcaattgcgctttacgtgcgccgcttgccagtttgtccgctttggtcagcagcaccagaacggcgatattgctgtctaccgcccactcaatcatctgctgatccaaatctttcagcggatggcgaatatccattagcaccaccagaccttgcaggctctgacgtttttcgaggtattcgccgagcgcacgctgccatttgcgcttcatctcttccgggacttccgcataaccgtacccaggcaagtcaaccagacgcttgccgtcagccacttcaaacaggttgataagctgggtgcgccctggggttttactggtacgagccaggcttttctggttagtcagcgtgttcagcgcgctggatttacctgcgttggaacggcctgcaaaagccacttcaattccggtatcggaaggtaggtggcgaatatcaggcgcactcatcacaaaatgcgtctgttgataattcaaattagtcaaagcggtcgtctccgtcagtcaaagctttgtggcgattatacctgaaccataataaaaggcggatttttcggcgtgagcgttgtaagtaaaagccatacgctttgtgagacattgccgatagtctttatgcgaaatagcagagaaaattctgcgatgcatgtcaaataagctatataaatcagtgaattgcttttatataaaactctgaaaatgtgcaaatactgatggcggttgattgtttgtttaaagcaaaggcgtaaagtagcacccatagagcgaggacgctaacaggaacaatgactcaggatgagggtcaggagcgccaggaggcgaagacagaggattgtcaggaagacaaacgtccggagacgtaattaaacggaaatggaatcaacacggattgttccggctaaaggaaaaacagggtgtgttggcggcctgcaaggattgtaagacccgttaagggttatgagtcaggaaaaaaggcgacagagtaatctgtcgccttttttctttgcttgctttctgttagattccgccgcaaatctatactgaataaaacggctaaaagacgaaccattatgaaaccaagttctagtaacagtcgcagcaaaggtcatgcaaaagcgcgtcgaaaaacacgcgaggagctggatcaggaagctcgtgatcgcaagcgtcagaaaaaacgtcgtggtcatgcgccgggcagccgcgcagcgggcggaaacaccacgagtggcagcaaaggccagaacgcaccaaaagatccacgtattggcagtaaaacccctattccattgggcgtgactgaaaaagtcaccaaacagcacaaaccgaagagtgagaaacctatgcttagtccgcaggcggagttggaattactggaaacggatgagcgtctggatgcgctgctggaacgtctggaagcaggcgaaaccctgagtgccgaagagcaatcctgggtggatgctaaactggatcgtattgatgagttgatgcagaaactcggcctctcttatgacgatgacgaagaagaggaagaagacgagaagcaagaagacatgatgcgtctgctgcggggcaactaacggattgccgccgtgggccttcccgttctgctgataacccttccggttatatgttatctggtgtggttattcgttaaactacagcggttgtcgcggcgacaaaagtggctgcgcaaccggctgatgacccgaaacgggcatccgccggtacgccgtagccgccagagacgccatcggaaggagtgagcatgtctgtacagcaaatcgactgggatctggccctgatccagaaatataactattccgggccacgatacaccagctacccgaccgcgctggagtttagtgaagacttcggcgaacaggcgtttttacaagccgtggcgcgctatcctgagcgtccattatctctctacgtacatatcccgttctgccataagctttgttacttctgcggttgcaataagattgttactcgccagcagcacaaggccgatcagtatctggacgcgctggagcaagaaatcgtccatcgtgcaccgctgttcgccgggcgtcacgtcagccaattgcactggggcggcggaacgccgacgtatctgaataaagcgcaaatcagccgcctgatgaagctgctgcgcgaaaacttccagttcaatgccgatgcggagattagcatcgaagtcgatccgcgggaaatcgaactggatgtactcgatcatttacgcgccgaaggctttaatcgcctgagcatgggcgtgcaggacttcaacaaagaagtgcaacgtctggttaaccgcgagcaggatgaagagttcatctttgcactgcttaaccatgcgcgtgagattggttttacctccaccaacatcgacctgatttacggcctgccgaaacagacgccggagagtttcgcctttaccctgaaacgtgtggcggagctgaaccccgatcgtctgagtgtctttaactacgcgcatctgccgaccatttttgctgctcagcgcaaaatcaaagatgctgacctgccgagtccgcagcaaaaactcgatatcctgcaggaaaccatcgccttcctgacgcaaagcggctatcagtttatcggtatggatcactttgcccgtccggatgacgagctggcggtggcccagcgtgaaggcgtgctgcatcgtaacttccagggctacaccactcagggcgataccgatctgctggggatgggcgtttccgccatcagcatgattggcgactgctacgcgcagaaccagaaagagttgaagcagtactatcagcaagtggatgaacaaggcaatgcgctgtggcgtggtattgcgctaacgcgtgatgactgtattcgccgcgatgtgattaagagcctcatctgcaacttccgtctggattacgcccctattgagaaacagtgggatttgcacttcgctgattactttgcggaagatctcaagctgctcgccccgttagcaaaagatgggctggtggatgtggatgagaagggaatacaggtgacggcgaaaggtcgcttgctgatccgcaacatttgcatgtgctttgatacctatctgcgccagaaagcgcggatgcagcagttctctcgggtgatttaaatagtgaatggcgcttcgtttacaaagtagaaaacgaaagcgccatcaatgtgctgagaacaagattgcctgatgcgctgggcaacaaaacctgttgaaattattgcttttgtaggccggataaggcgtttacgccgcatcaggcatctgagcatgatgcctgatgcggcgctggtcgcgtcttatcaggcctacgactttctccgcatccggcataaacaacgagcttcagctaaacagcccaatcattgcggcacacagcacggcagcaacggcagtttgcggtgtgtggctgtcaactgcgccactcgataccagattaattattgattccagcataatgactctccccgttttccgggcaagatcatactgaacttatcggaacagtaaagcgtaaaataccagcaatttgcgctcaataatcaatctttacacacaagctgtgaatcactccatccccagctcttttaacttacgcgtcagggtgttgcggccccagccgagtagccgcgccgcttcctgtttatgcccctgcgtatgtcgcaacgcggtcgtcagtaacgtccgctccagctctggctgcgcttcggaaagcagattttgatgaccggaacgcagcgctctgtctgcccactgcgcaagaagcgtcgcccagctgtccggttgcatttggctagtactctccgcaaccgtactttcaaacagttcgccgggcaaatcctgaatcaacacttcctgcccggcggccatcaccgttagccagcggcaggtgttttccagctggcgcacgttgcctggccacgccagacgcgtcagagcagcttcggtttccggatgcagtaacttcgcttctacgcccagttcgcgcgcggcaacctgtaaaaaatggcgcgccagacggggaatatcttcccgacgttcgcgcagcggcggcagatgaacgcggataacgttcaggcggtggaacagatcctcacggaacttaccttcctgcactcgctgttcgagattctggtgagtggcagcgataatccgcacatccactttcaccggcgcatagccgccaacgcggtaaaactgaccgtctgccagcacgcgcagcaaacgcgtctgcacatccagcggcatatcaccaatttcgtcgaggaataatgtaccgccatcggcctgttcaaaacgcccctgacgaatggtattcgcgccagtaaacgcgcctttctcgtggccaaacagttcactttcgatcaaatcttttgggatagctgccatattcagcgcgataaacggcgctttggcgcgcggactgtggcgatgcagggcatgagcgaccagttctttaccggtgccggattcgccgttaatcagcacgctaatagaagaacggctaagccgaccgataatacggaacacgtcctgcatggctggcgcttcgccgatgatatcggtcgttgggccgttaagctgaacattacgcggctgctgctgttcctggtaatgactgatagcgcgctcaaccagcgccactgcttcgtcgatatcaaacggtttgggcagataatcaaacgccccttgttgataggcgctgacggcagcatccagatcggaatgtgcggtcataatgatgaccggaagcattggatggcgctgtttaatctgcttgagcagcgccagcccgtccattcccggcatacggatatcactaagcagcacatccggcgttttgctcgccagcgcctccagcacttctgcgccgttctcaaacgtcgtacaggttaaacctgccccagcgagcgcacgttcaagcacccaacggatggaactatcgtcatcgactacccagactatccctcgttgcataaacgtcacctttatttcctgataggcaggtaaacgctgaactcggtatgccctggccaactggtaaattcaattttgccactatgctgatcaatcaaattacgagcgatggataagccaagcccggtgccaccttcgcggccgctgaccatcgggtaaaacagcgtatcctgcaaatgaggcggaatgcccggcccgttatcttccacatcaatccgcgccgccagccggtagcgctcgccgtgtaaggtcagttgaaacgcggtgcgggtacgcagaatgatttcaccgccttccggccccagcgcctgtagcgcattgcgcacaatattcagcaagacctgttcaatttgatccgggtcgtgcgccagttccggtaggctgggatcgtaatcacgaatcaaccgcacgttgtccggcagttccatgctcaccagcgttaccacgcgttcagccactttgtgaatactttcggtaacgcgcgtaccgggcagctgcggccccaacagacggtcgaccagatttcgcagccggtccgcctgttcgataatcactttggtatattcgagtagacttgggtcaggtaacgctttgctgagcagctgcgccgcgccacgtaaaccgccaagcggatttttaatctcatgtgccaggccgcgcactaaatcacgggcagcaacctgctgggcgtgctgtagctgttcctgacttaagcggcgctggttatccatcggagccatctccagcaggatcatgccgtccggcatacgctgggccgtcacagaaaggatatggctgcgcccgtcgatgaccagcgtcacttcgttatcggtaaaaccttgccccgcctccagactttcttgcatcagctcgatatttaaactgaagtagctcaacagttccggtaacggtgtaccaaacaatttgcgggagctttgggcgagcagttgttgcgcggcagggttggcgtaatggatcgccaggttgtcatcgattaacaaaatactgttaatcaggctgttgaggatctgcccagcatcgggctgcgtgcctgttgccataaagcagtctcctgaacaggttgcaccattttagtgcattatagctttttacggataaaaagcgcgaagcatcagagaattgacggagaaaaaagcccatgcagagatgggctacagatagctgacaaacttcacgttggagagcgactcacctgctccggcctaccacatcatcaccgtgtaggccggataagacgcatttgcgtcgcatccggcgtgatgtgcttgccaccgatcccaggcctgccagagacaggcgaaaagtttccacggcaactaaaacacttagacgctgtagtacagctcaaactctaccggatgcggagtcatacgcacgcggtcatcttcttcgcgacgcagagcgatgtacgcatcaattgcttcgtcagtgaacacgccaccggctttcaggaactcgcggtccagatccagttcgttcagtgcttcttccagagagcctgcaacctgtgggatctctttcgcttcttctggcggcaggtcatacaggtttttgtccatggcttcgcccggatggatcttgttcttgataccatcaagaccggccatcagcagggcagcaaagcacaggtacgggttagctgccggatccgggaaacgtacttcgatacgacgtgctttcggagaagaaaccaccggaatacggatagacgcagaacggttacgcgcagagtaagccagcattaccggtgcttcatagcccgggaccagacgcttataagagttggtggtcgggtttgccagggcgttaatcgctttagcgtgtttgattacgccgccaatgtagtacagcgcctgctcagacagacctgcgtatttgtcgcctgcgaacaggttaacgccgtttttagacagagacatgtggcagtgcataccggagccgttatcaccgaacatcggttttggcataaaggtcgcggttttaccgaagcggtgcgctacgttgtgcacaacatatttgtagatctgaatttcgtcagcttttttggtcatggtattgaagcgggtagccacttcgttctgaccagcagtcgctacttcgtggtgatgggcttcaaccaccagacccatctgttccatcaccagacacatttcagaacgaatatcctgagcgctgtctaccggtggaaccgggaagtaaccgcctttcactgccggacggtgacctttgttaccaccttcgtattgggtggaggagttccatgcgccttcgatatcgtcgatagcaacgtgggaaccggagatagaacttccgaaacggatgtcatcgaacaggaagaattcaggttctggcccgaacagtacggtgtcggcaatgccagtggaacgcaggtaatcttcggcgcgcttcgcaatggagcgcgggtcacggtcatagccttgcagggtgccaggttcaaggatgtcgcaacggataatcagggtggagtcggcgaagaacgggtcaatcactgcggtggatgcgtctggcatcagcaccatgtcggactcgttaatgcctttccagccgccaatgctggagccgtcaaacattttgccttcttcgaagaattcagcattcacctgatgagcagggatagtgacgtgctgttctttacctttagtatcggtgaagcgcaaatcaacaaacttcacttcgtgctcgttcagcatcgtcagtacgtgttcagcggacatactttaactctcctggattggtcatggtcgtcgtggtaacgaaatctgcaattattttggccgtgtcgccgtaaaaaagataaagcgaaatctgtgccaacttttaaattgcccctaaaaggcgttatcatgcgcaccatcgtgcaaaagggctgcaccacgatgtgaatgttgcaccaatatagtgcttcaatggaaacattaagcaccatgttggtgcaatgacctttggataaccctttttatgctccgtgaaagcgatcacaaagggactctgcaatacttgtttgcggaggatgtttgtgatcctgttttgtagtgcgattaatccgtgtacaataacgcgctatttctaatgcctgaggcaaagttgtgatcgaaaaattgcgtaatatcgccatcatcgcgcacgtagaccatggtaaaaccaccctggtagacaagctgctccaacaatccggtacgttcgactctcgtgccgaaacccaagagcgcgtgatggactccaacgatttggagaaagagcgtgggattaccatcctcgcgaaaaacaccgctatcaaatggaatgattaccgtatcaacatcgttgataccccggggcacgccgacttcggtggtgaagttgaacgtgtaatgtccatggtagacagtgtgctgctggtggttgacgcatttgacggcccgatgccgcaaacgcgcttcgtaaccaaaaaagcgtttgcttacggcctgaagccgattgttgttatcaacaaagttgaccgccctggcgcgcgtcctgattgggttgtggatcaggtattcgatctgttcgttaacctcgacgcgaccgacgagcagctggacttcccgatcgtttacgcttctgcgctgaacggtatcgcgggtctggaccacgaagatatggcggaagacatgaccccgctgtaccaggcgattgttgaccacgttcctgcgccggacgttgaccttgacggtccgttccagatgcagatttctcagctcgattacaacagctatgttggcgttatcggcattggccgcatcaagcgcggtaaagtgaagccgaaccagcaggtcactatcatcgatagcgaaggcaaaacccgcaacgcgaaagtcggtaaagtgctgggccacctcggtctggaacgtatcgaaaccgatctggcggaagctggcgatatcgttgcgatcacgggccttggcgaactgaacatttctgacaccgtttgcgacacgcaaaacgttgaagcgctgccggcactctccgttgatgagccgaccgtttctatgttcttctgcgttaacaccagcccgttctgcggtaaagaaggtaagttcgtaacgtctcgtcagatcctggatcgtctgaacaaagaactggtacacaacgttgcgctgcgcgtagaagaaaccgaagacgccgatgcgttccgcgtttctggtcgtggcgaactgcacctgtctgttctgatcgaaaacatgcgtcgtgaaggtttcgaactggcggtatcccgtccgaaagttatcttccgtgaaatcgacggtcgtaaacaagagccgtatgaaaacgtgactctggacgttgaagaacagcatcagggttctgtaatgcaggcgctgggcgaacgtaaaggcgacctgaaaaacatgaatccagacggtaaaggccgcgtacgtctcgactacgtgatcccaagccgtggtctgattggcttccgttctgagttcatgaccatgacttccggtactggtctgctgtactccaccttcagccactacgacgacgtacgtccgggtgaagtgggtcagcgtcagaacggcgtactgatctctaacggtcagggtaaagcggtcgcgttcgcgctgttcggtctgcaggatcgcggtaagctgttcctcggtcacggtgcagaagtttacgaaggtcagattatcggtattcatagccgctctaacgacctgactgtaaactgcctgaccggtaagaaactgaccaacatgcgtgcttccggtactgacgaagccgttgttctggttccgcctatccgcatgactctggaacaagctctggagttcatcgatgatgacgaactggtagaagtgactccgacctctatccgtattcgtaaacgtcacctgacggaaaacgatcgtcgccgcgccaaccgcgcaccgaaagacgattaatttcgttttttagtcataaaaaacctgccagcgatggcaggtttttttttgcctgtcgtgagcgcacaccaatgcgagtatctcccttataagtctgtggttacgtcaatagagagctttgtcacaattatctgcaaagtcatacgccgttaattgctttcttttttggcgtaagcgtaagatgcttcatctggtttaaaccaaaaggattaaacaatggcggagaatcaatccaccgtagaaaatgcaaaagagaaactggatcggtggttgaaagatggcatcaccacgccgggtggaaaactccctagtgaaagagagctgggagaactgctgggcattaaacgtatgacgctgcgccaggcgttgttgaacctcgaggcagaatccaaaatcttccgtaaggatcgtaaggggtggttcgtgacccagccgcgatttaattacagtccggagctgagcgcgagctttcagcgggccgcaattgagcaagggcgagagccttcctgggggtttaccgagaaaaaccgtaccagcgatattcccgagacgctcgcgccactgattgcagtgacgccaagtactgaactctatcgcatcaccggctggggggcgctggaaggacataaagttttctatcacgaaacatatattaatcctgaagttgctccgggctttattgaacaacttgaaaaccacagtttttctgcagtctgggaaaagtgctaccaaaaagagacggtagtaaaaaaattgattttcaaacccgtcagaatgccgggcgatatcagcaagtatcttggcggttctgcgggtatgccagcgatcttaattgaaaagcatcgcgccgaccagcaaggcaatattgtccaaatagatattgaatattggcgatttgaggccgtagacctcatcattaatctgtaagtgttttatggtgacaataaataacgcaagaaagattctacaacgtgtcgacactcttcctctttatttacatgcttatgcctttcatttaaatatgcggctggaaagagtgttgcctgctgatttacttgatatcgcaagtgaaaataatctacgtggcgtcaaaatccatgttctcgatggcgagcgtttttctcttggtaatatggacgataaagaactctctgcctttggggataaagcccgccgtctgaaccttgatattcatattgaaaccagcgccagtgataaggcatctattgacgaagccgtcgccatcgcgttgaaaactggggcaagctccgtacgtttttatccacgttatgaaggtaatttgcgcgacgtattaagcattatcgctaacgacattgcctatgtacgggaaacgtatcaggacagcggcctgacttttacgatcgagcagcatgaagatttaaaaagtcatgagctggtgagcctggtcaaagaaagtgagatggaatctctttccttactgtttgattttgcgaacatgatcaatgcaaatgagcatcccatcgacgctttaaaaacgatggcaccgcatattacccaggtccatatcaaagatgccttgatcgttaaagaaccgggtggcctgggtcataaagcctgtattagtggtcagggtgatatgccgttcaaagcgttattaacgcaccttatctgcctgggtgatgatgagccgcaggtgacggcatatggcctggaagaagaggttgattactatgcgccggcgttccgctttgaagacgaagatgataatccgtggatcccttatcgccagatgagtgaaacaccattgccagaaaatcatttactggatgcgcggttacgtaaagaaaaagaagatgcaattaatcagataaatcatgtgcgtaacgtactacaacaaatcaaacaagaggcaaaccatcttctgaaccactaataagttttaactcatacgcagttaataaaaccattccatatgaatggtcggtatcttattgcctttaaaacagtgattttaaaaatcgcttaggggatgttatgctcacgaaaaagaaatgggcgttatttagtctattaacactgtgtggcggtacaatttataaattaccgagcctgaaagatgcgttttatatcccgatgcaggaatatttccatttgaccaatggtcaaattggtaatgctatgagcgtaaacagttttgtcaccacagtgggcttttttctgtctatttattttgccgataaactaccgcgcagatacaccatgagtttcagtctcattgcgacaggattactgggtgtttatttgacgacaatgccggggtattggggcatcctctttgtctgggcgctatttggcgttacttgcgacatgatgaactggccggtcttgctcaagagcgtaagtcgattgggcaatagcgaacaacaaggtcggttgtttggcttcttcgaaacagggcgtggcattgtcgataccgtggtggcattttctgcgttggcagtatttacctggtttggcagtggcttattaggttttaaagcaggcatctggttctattcccttattgtgattgccgtaggcattattattttctttgtcctgaatgacaaagaagaggcaccgtccgttgaggtgaaaaaagaagacggagcaagcaaaaacaccagtatgaccagcgtgctgaaagacaaaactatctggcttatcgcttttaacgtcttcttcgtttacgcggtttactgtggcctgacattcttcattccattcctgaaaaacatctatctattgcccgttgcgctggtgggggcttacggcatcattaaccaatactgtctgaaaatgattggtggaccgattggtggcatgattagtgataagatcctgaaaagcccaagtaaatatctatgctacacctttatcattagtaccgctgcgctcgtactgttgattatgctgccgcacgaaagtatgccggtctatttagggatggcatgtacgctgggctttggcgcgatagtctttacacagcgagccgtattttttgcacctatcggcgaagcaaaaattgctgaaaataaaacaggtgcggcgatggcgttgggtagctttattggttacgctccggcgatgttctgcttcagtctgtatggctacattctggatttaaatccggggattattggctacaaaatcgtgtttggcattatggcctgcttcgcattcagtggtgcggtggtttccgtaatgctggttaagcgtattagccaacgtaagaaagagatgctggcggctgaagcttaattaatggccggatgtgcttaatccggccaacgaaaaccgtatcaaccgtaggccggataaggcgtttacgccgcatccggcagtttcacatcagaagaaatacttcgtcccgatacggatctggttttgctcgcggtggtacggttcgacgttgcggtctaaccagcgcaattcgaaataagggagccagtgttcattaatacggtaacggaaggtgttagtgatttcccaatgatgatctttcccgttgctactattaaagtcattcactcgcatgaagtaatgtggctcaaatgtataggaaaatttatcggtgattttaaaattccagtaggtgccaatttcataggtgtcattattatccagttccccgctcaaatctgtactactatagttattatggttatagcgatttcgtactgtcagattaaaccatggtacaaatttatagttgacgtccagatacactgcaccaccgctaccgatactcttatcattaattaagccaccgggctggatggttaatttatcggttggtttaaataacggataccagccttcaatttcgttatatccatgttttagttcatcttctcgctgaaagttgtaggtattggttaacataatacccgcgcccatatcgaagttataacccacacgtagcataacctcgccctgatcggaggcaagattatatgcctccctgttttcgacgtatgcgccagcaaatacgctggcagaggtcagagaagataataaaattattgcattaatctttttcataataagtccattttttaaacgtagggaggccgccacccaccaggatggaaatagcggctattgacatttataacgttacggaagccgttttttcttctgtcgccatctctttatttttgcgttggttgatttcctcaataatcaatgcaaaccgtttttcattgagtgtgtaaaagaatcccatcgtcaatgcagcaataattgccagtgcacaaggccagataaaaatgagctgacgcaaaccctgtaatgtcgcatcgctttgcgcgatgttgggaacataaccaatttgcgtcagcataatgcctggcaagaagccagcaagtgcggcagaaattttacgaaagaaggtataaccggtataaacagaaccttcggcacgaataccggttttccattcaccgtaatctacggtatctggtaccagtgcccagttcaggctgtttacaaaggccgtgccaaaaaaggcgacacaagagaacatgacgaaagtgaaagagttacttccccagaaataattcagtatatcacccaccgcccacagcaccatgccagccagataaacctgttttttaccaaaacattttacagttaatggcaccagtaatacgccgatgaggatgcatcccatactgaagaatcccatccagctcaataaattaatatcattcagcacatactgggtgtaatagacctgaatcgccagtttgatattaaatgccgccagggtacacaagttagcaatgcataaaaccagcaatggcggattccgaaatatcgcgcaaaaacttttgagaatactggctttatgtccggttggcgttgtgtccacataatgctctttgacgcctctgtagcacagcatcataaaaataaagccgccaatggagaacataagtgccgcacaggcataaccgacggtactgtcagaaaaaaggctctgcaacggaataaacgccacggtacaaatcaatagccctatggttgcaccaccctggcggtaagccgcgagctgcgcgcgctcattcgggtttttggtaattgccgggatcatcgcaccatagctgcagttcatcagactgtaactaagtccaaacatcataaacagcgcggtggcaatcgtcgttttaaccggcaaacaaaaggtggtggcgataaactggagcgttgcaattaacgccgccggaaccgctgcatataaaataaagggacgaaatttgcctttaggcccaatatttttccggctgtcgagtaaaaatccggtgagcatatcggtaaacgcggtaaaaaacttcgccaccagaaagataatcccgccatagtaagcaggcatccctaattcatcggtataaaatttgaggagatacagagtaccgatgcagagcattaaattgctaccgacgtcgcccataccataggcgattttttcccgcagattcagttttaatgtcagtggattatggtcagacataatcactccttataacgccccgcagggcgtcgtttattattattacgccgtgcgtttacgggcttctatctcttccacaatgcggacatacatcttctcgttcaggctgtagaagcaacccatcgccacaatggtgactaccgccagtgcgcttgggtagatgaagatcaactggcgtaacccttcaatggtgtggtcagcctgtgcgacgttcggcacatagccaatttgcgtcagcatccagccggggaagaaaccagccagcgcctgagacactttgcgaaagaaggtaaaaccggtgtagaccgttccttcgctacgcacgccggtgcgccactcgccgtactcgacggtgtcggaaaccagcgcccagttcaggctgttaacaaacgcactgccaaagaacgccaggcaggagaacgccacgaagctgacgctaccgccgccgaagaaatagttgagcagatcgcccagcacccaaatcagcaggccgccgatataaactttcttcttgccaaaacgtctgacactggcaggcatcaggaatacgccgatgaaaatacagcccatgctgaaaaatcccatatagctcaacaggatgggatcgttaagcacgtactgggtgtaatagacctggatggcgagcttgacgttaaacgcccctaaagtgcagaggttggcaatgcacagaatgaacagcgggcggttacccgcaattgcgcggaaagattgcagcaggcccggcttttgcgccggattagcaggctgggtttcgacataacgctctttcacgccgctgtagcagatccacataaacagcaggccaaacagactaaacagcgtggcggcgaagatatagccaagttgctgattaccttcgataagattcataactggcacgaatcccaccgtgcacagcagcaggcccagcgtagcgccgccctgacgccatgccgccagactggcgcgttcgttggggtttttggtgatagcgggaaccattgcgccgtaggagcagttcatcatgctgaaaaacagtccgtaaagcataaacagaatagtggccatcaccgttttaccggtgacatcaaacggtgtgccgacaaagttggcgatcgccagtaaggtgaccgggaaactcgcatacagaataaaaggacggaacttaccttttggaccgatcttgcgtcgggaatccaacataatgccggtacccatatcggtaaacgcagtaaagaatttactaatcaaaaagataatgccgccataggtgcctggcagccccagaacgtcggtataaaacttcaaaagataaagcgtaccgatatccagcaggatgttagaggccaggtcgccaataccgtaagagagtttctctttaaagggcaggcgtaaagttgctggatcttccgttgtgatgtgactcatgcttgttctccctttgcccatgagtttccccacgggcggatgtgattagatgctttttaagctcgcgaacagtgccgcccattcgctatcggcgcgataaaagaccggcggcttgccgatgggcgcattaacggtaacttccccgccccggaacgcttcacccgtccaggcgtggacccagttatcctccggcagatagagcgtccagtcgctacggccttcttcatgcaccggagcgaccagaatgtcgcgacctaacaggtactgatatttcagggtgtaagtgtgcgcatcgtcttcgtaatgcaggaacagcgggcgcataaccggcaggccggacttcgcattcagcgcgacggcctctttcaggtaaggtttcagggtggtgaagacggtggtcatacgggcgaaatgggcgatggtttctgcgtcgccgtcaaactgccagttgtcgccaggacggttaccttcgtgggtgcgcatcatcggcgtgaaggcgctgaaatcgcaccagcgcagcagcagctctttgctgcgcttcatctcaaacagggtggtgtaaccgccaatgtcgctgtggtgcaggccatgtccggtcattgccaggctcagcgccgccgggacaacgctcgccaggccatcgtcgagactccagtcgacgttctggtcgcccgcccacatcatggtggagtatttctggctaccggtagaaccggcgcgcataaagaaaaggatctcgccgagcttgcccgtttcttcaagggcttcgtagttacacttcgcccacagcgcaggccaggcgttatgcataatttcggcactgacgccgttatgcaagtacgtgtcggtgggcagatactcgccgaagtcagccatccagccgccgcagccgagttcaatcatgttctttttgatcacttccttgaaccaggcgtaggcttctggattagtgagatcgacaacgccgccgtaaaactcgccaaactccaccagatagtcaccgccagaggcatcttttgccagatagccgtgttgtgccgcttcttcgcagagatctttatcgctggcaacatacgggttgatataggccaggaactgcacgccctcctgattccactgcttaatgcgactatccagttgcgggtagttttcgctgttccacttccagttccacatcacgcgtttgccaaaagaggtcatacgaataccggaccagtcctgcgcccagatgccgttgaccttcacgcccgcgttacgcatggtgtccagtttcttctggcacacttccgtcccgccctgaatgccgagcgttactccgtcataaatccagtcgggcagttctggctggcgtcccagcagggcggttaatttttccagcagggaaatgtatgtgtcagcacattcaaaacgcagcgttgctttgtcttcccacagcgccagttcatggtattccggggcactaaagtcgaagttcatatagcaactgttatcaacatggcagtaatacttctgcgtgctgacaaacgtaggctgtgggaagaaagtccagtaatagtcgccgcccgcattttctttgcagtcggcctgccaggtgacataggtttgtttgttgcgaccaacgccttgttcactggtccatagcgggaacggtttgccacgcagatcgaagtaggaaaactgttcgccgcagccgtagatatggtcctctggttgagcggcaaggcgcagccagatacggttgtggttaaggttgtcgttttgtagttccagcaataaacgcccctgatcgtcggcagagatattcagcgtggcgctaatgtcagaaccacggctgaaatgaattaaccaaccatccggactctggctgacgatggcgtcggtaagcgcaattttctcctgtagtttatctttaatgctgaaattaccgcggaacatatcgatatccgctataccactgccaatccataaacaaggattatctttgctatgggttaaaataagacgttgttgaaaatgtagggtaaaactgtcgttattctgatgaaattgaaaatctaataactgtggacgtggcgtatccataactaatctccatagagttgagaacgagattgttgccttcctgttattacaggcttatgtaaaatgattctcataaaactgatatataaaaactttacagaagctgagctgtttttaacttaataaattgaagatacataatgttgcctttagcgagtgaaatgttcttcaatgattttgactgctaatcaatacaagttattttctctgtccgtaaatattaaaaaacaggcggtgcggttttccactttccagtaataataagtcgataccactattaaaggcgttaggcgggcaactcataggttcaactgccagtccctgacgctgtaatttttcaccgctataaacctgcacccagagttgatcggaacaaaggcttacgctaagcgcctgctgtggatgggtaatggtcatttcccacaaatcattagcggttttaaaggtgtggtcgatttttgtcgcggctatttttttcgcctgcgtgaaatttaaatccagctcatcaacgtggtgaagcgttgtcggattcgcgtgctcatcgacggcataaacctggtttgccggaagctggaacagatattcatcaacagatgttaagttgcaggttaaataaggatgaatacccacgccataaggcgctgcgacagtgccgatattctggcttgcgatctcaacggaaagacccgtgtgtgcgttgaggctataaacaacttgactagccagcataaacggatagccgtaactgggcggcagaaaagctgtcagggtaacgctggtggcggttaattcactaatttgccagtctcgccaggcaagcagcccgtgaatagcggctttactactatgttcattaatgggtaactgatattcctgcccctgatagcggtaacagccgttggcgatccggttcggccacggaataagcactttacccagatgcgccagcggcatctcttcgggtttgtgcgggatgactaaatgacaaccctgaaaggttaattcagccagaccagcaccgacggtcacaatggtcgcgtgataatcccccgcggcaagactaacggtctgtccactgcaatgcatattggtgatttgcatacaaggcaccttaattaagctcatacagcctcccgtgaggctgatgtcaaacccaaaaactgcaccggacggtcccctcgcccctttggggagagggttagggagaggggaaaacccgcaccctattttcagatcagttatttcgcattaatatccagcagacccgctgcaaccgctggagccatgccgggcgctaacgggatacgcgggatcaccaggcaatgcagcaggtgataaatatcctgtttgccgtcccagactttggtggtgaccttattgtccgcatccagctcctgccaccaggaaccattttcatagtccatcaggtacttaatgcagtactcccaccatgtttgataccaggtttcatactggcgatcgccagtgacggtgtagagcgcgtaggccgtacccattgcttcgacgataggccaacgtacacgttcgcggaccaccggttttccttcccagtcaacggtataaacaatcccgtccgcgccatcgggtgcccaggcatcgcgcacggtggcgttaaacagacctttggcatcttctagcagccatgctggtggttgttcgcaacgggcttccagggcagcatggatgtgcagcattaaacggccccattcgatccagtggcctggtgtacctccgaacgcgcggaagcgatgcgccgggttatctttgttgtaatccggcagcggattccactgggtatcgaagtgttcgttaacgcgataatgattatttctggcgacgtcgtggataatcacggaagccacgcgaatcgcgcgatccagccattttttgtcgtgagtgacgtcataaacaatcaagaaagcttccaccgcgtgcatattggcattgccgccgcggtactcttcggttttgctgaaggcttcgtcccaggattccaggcacatctgctcttcttcgctccagaaatatttctcgataatttcaatggtgtaatcgagcagcttgcgcgcttccgggtgacccgttgtgacggcgctggcggcacccagcagagcaaagaagtgttgatagccctgtttggaggcatccaccacgccctcgtcattcacgcaggcataccagccgccatattttttatcacgcagtgcgccgttcatggctttgataccgtgatcaaccaagctgtaagcgccaggtcgacccatcgccgcagcaacggaataaacgtgcaacatacgagcggtgatccacagatgggtgcccatctcttctttgatttgccctttattgcctaaccagccaaaaccagtcggcactacggaatttttaccaaaatcaaagatgcggtcggtttcctgttccagccaacggttgtggcttagggtgttaaaccatttcattccttttatcctcatcttagcggcgtttagccatcatttcgtcgacgatatcgccaagttgttgtaatttcggtgcgcaaacgtcacgcagcatcagctcgttgtctggtaaaccgacgacgcttgcccagactgcacggcctgccaggaatccgcttgcgcccgccgtcattgccacgcgtacggcacgcgggaacagtttttcgtcgacaccggaagagaggatcacccatggcatattgatatggtcattcagacgttgactagcacagagaagctcttgttgcggacctttgccataaagcggcatttcaactttgtagaggtcagcgccactgtcgcccagctctttggcggcatcgatgatcgcttgttcgcgatcgaatttatcgccacgacgcggtgggcggacgactggctcaatgatgcttaccagaccgtgactgtggcacagttcgttgaactctttcaccatatccagacgttgctgcgcatcttcatcactacgccacagcaccagcagttttaaggctttgccaccgtcttgtttgatctgtagcggattgattttgcggtcaataaccacgctatcgaccggaataccgttgccaggaatgaactcatcggcggcgacaatcatggcgcaacttttggcaatcgcgttttgctcaaccacctggcggtagcagaattgttgatctaccagaatcgcgctggcataagggctgagggcctttgcagcgttaactttgaaatcagttaaaacgctatcggctaccggagcgggtgccccagccgcggcaaacatcatgcgcatggcttcgcgctgatcgaccgccagcatggcaaaaccgccgcttgcgcgcgtaatgtcgttgatggtgtacttattcattcatttattcctttatccagtcgttacatttttactttggcagtcatcccggcactgacacggacctgttccagaatggcggaccagtcctggcgaccgcgacccgctgcgcgcgcctggctataaacctcccgactggcggcccccagcggcattggcacatgcagctggttggcgacatcaagggcgatgccaagatccttatgggcaagatcgatcatgaaggcgggagaaagatctccgctgaggactttgtttggccaggaagtggtgaagtgacctttaccggcggcggtaccgctcatcactttgacggcaacatcgaagggaagattcagggcttcgcacaaaacggcggcttctgcgctaagcgcattgagcgcgatgctcatgtagttgttgatgagcttaacgcggatccccatgcccggaccgccagcgttgatcaactcactgcccatcgccatcaggatcggtgtggcacgttcaacttgttcagcggtgccgccagccagcagtaacagagtaccggtaatggcatttgcagaagtacggcctaccggaacatccatcatgctgaagcctttggcttgcatatcggcaatcaatttatcggtttgcagcggatggatggtggacatatcaatgaccagcgcatcggtagataagccttcgcaaacgccgttttcaccgaacaacacgttgcgcaccagatcgccattcggcaacatggtaatgataaattcggcatctttagcggcctgcgccgggttggcggcgggagtcgcacctttgtctaccagatgccgcacagcttcggcgttcacatcaaagacgcgaagttgatgcccttgctgcaataaattgctcgccattgggctacccatttgtcctaaaccgataaacgcgattgctgccataaccctctcctgaatacagttatgtcactttttgtcatttatgacatgctttgcttgtctgtttttgatcgtatttgtaatttatcgtcaaaaaattgacagccgtcactttttaaacaattggtgaaattaaaatgaacgcatcccaaaatgtttaaggaatgaccatgattcgtgttgcttgtgtaggtataaccgtgatggatcgcatctattacgtggaagggttaccgacggagagcggtaaatacgtggcgagaaattatacggaagttggtggcgggccagcggcgacggcagcggttgcggcggcaaggctgggggcgcaggtcgattttattggtcgcgtaggtgatgacgacacgggcaacagcctgctggcagagctggaatcctggggcgttaacacccgttacaccaaacggtataaccaggcgaaatctagccaatccgccatcatggtggataccaaaggcgagcggataatcattaactaccccagcccggatctgctgcctgacgcagagtggttggaggaaattgatttctctcagtgggatgttgtgctggcagatgtacgctggcacgacggcgctaaaaaagccttcaccctggcccgtcaggcgggtgtgatgaccgttctggacggggacattacgccgcaggatatcagtgagctggtggcattaagcgatcacgcggcctttagtgaaccgggtctggcgcgcttaacgggcgtgaaagagatggccagtgcgctaaaacaggcacaaacgctcacaaatggtcatgtctatgtgacccagggtagcgcaggctgcgactggctggaaaatggtgggcgtcagcatcaaccggccttcaaagttgatgtggtagataccacaggtgcgggtgatgtttttcacggcgctttggcggtggcgctggcaacaagtggggatttagcggagagtgtccgcttcgccagcggtgtagcggcgttaaaatgcacacgtcccggtggacgagccgggatccctgactgtgatcaaacccgatcttttttgagtctttttgtataaaatgccagggtgatggtttttcgaggaattttcatgagccttaccgaactaaccggtaacccgcggcacgaccaactcctcatgctgatcgccgagcgtgggtatatgaatattgatgagctggcaaatctgctggatgtctccacgcagacggtccgccgggatattcgtaaattaagcgagcaaggcctgattacgcgccatcacggtggcgcgggtcgggcttccagcgtcgttaatacggcgttcgagcagcgtgaggttagccaaaccgaggaaaaaaagcgattgccgaagcggtggcagactatattcctgatggtagtacaatatttatcaccattggtacgactgttgagcatgttgcccgggcgttacttaaccataatcatttgcggataatcaccaacagcctgcgtgtggcgcatattctttaccacaacccgcgctttgaagtgatggtgcccggcggtacgttgcgctctcataatagcgggatcattggccctagtgcggcgtcctttgtggctgattttcgtgctgattatctggtaacaagcgttggggcgattgagagcgatggcgcgttgatggagtttgatgtaaacgaagctaacgtggtgaaaacgatgatggcgcacgcgagaaatattctgctggtcgccgatcacactaagtatcatgctagcgcggcggttgaaattggtaacgtggcacaggtcactgcgctctttaccgacgagctgccgcccgctgcgctaaaaagtcgcttacaagacagccaaattgaaatcattcttccccaggaagacgcgtaaatttttgtgaccgttaacctggcttcataccttgccacatagccaaacccatcctttcccgctacagttaatttcttgtggcgcgaaaggaggcaaaaatgctctatatctttgatttaggtaatgtgattgtcgatatcgactttaaccgtgtgctgggagcctggagcgatttaacgcgtattccgctggcaagccttaagaagagttttcatatgggggaggcgtttcatcagcatgagcgtggggaaattagcgacgaagcgttcgcagaggcgctgtgtcatgagatggctctaccgctaagctacgagcagttctctcacggctggcaggcggtgtttgttgcgctgcgcccggaagtgatcgccatcatgcataaactgcgtgagcaggggcatcgcgtggtggtgctttccaataccaaccgcctgcataccaccttctggccggaagaatacccggaaattcgtgatgctgctgaccatatctatctgagccaagatctggggatgcgcaaacctgaagcacgaatttaccagcatgttttgcaggcggaaggttttagtcccagcgatacggtctttttcgacgataacgccgataatatagaaggagccaatcagctgggcattaccagtattctggtgaaagataaaaccaccatcccggactatttcgcgaaggtgttatgctaaaaaccattcaggacaaagccaggcaccgtacccgtccactatgggcctggctaaaactactctggcaacgcattgatgaggacaacatgacaaccctggcaggtaaccttgcctatgtgagcttgctcagtttagtgccgctggttgccgttgtttttgcgcttttcgccgcttttcccatgttttccgacgtcagcattcagttacgtcactttatttttgccaactttctgcctgctactggcgatgttattcagcggtatatcgaacaatttgttgccaattccaacaagatgaccgccgttggggcgtgcgggctgatcgtcaccgcgttattgttgatgtactccatcgatagcgcgttgaataccatctggcgcagtaaacgagcgcgaccaaaaatttacagcttcgccgtgtactggatgattttaacgctggggccgctgctggcaggggccagtctggcgatcagttcctatttgctctccctgcgctgggcgagcgatctcaatactgtcatcgacaacgtgctgcgtatttttccgttgctgttgagctggatctccttctggttgctgtacagcattgttcctgccatccgcgtacctaaccgcgacgcgattgtcggcgcgtttgtcgccgcactcctgttcgaagcaggaaagaaaggtttcgcgctttatatcaccatgttcccgagttatcagctcatttatggtgtgctggcggtgatccccattctctttgtttgggtctactggacatggtgtatcgtcttgcttggcgcggaaattactgtcactctcggggaataccgcaaactaaaacaagcagctgaacaagaagaagacgacgaaccatgattgcattaattcaacgcgtaacccgtgccagcgtcaccgtggagggagaagtgacgggcgaaattggcgcgggacttttggtgttattgggtgtcgaaaaggatgacgacgaacagaaagcaaaccgtctgtgcgagcgtgtgctcggctaccgcatctttagcgatgccgaaggcaagatgaatctcaacgtgcaacaggcgggcggcagtgtgctggtggtttcccagtttaccctcgccgcagataccgaacgggggatgcgcccaagtttctccaaaggtgcaagtccggatcgcgcagaggcgttatatgactatttcgtcgaacgctgccgtcagcaagagatgaacacgcaaacaggacgcttcgctgcggatatgcaggtaagcctggtcaatgatggccccgtgacattctggttgcaggtatgagccagcttccagggttgagtcgggaaacaagagagagtatcgctatgtatcaccttcgggttccacaaacagaagaagaattagagcgttactatcagtttcgctgggaaatgttgcgtaagcccctgcatcaaccaaaaggtagcgaacgcgacgcgtgggatgcgatggcgcatcaccagatggtcgtcgacgagcagggtaatctggtggcggtaggccgactgtatattaatgccgacaatgaagcgtccattcgctttatggccgttcatcccgacgtgcaggacaaagggttaggcacgctgatggcgatgaccctggagagcgtggcgcgtcaggaaggcgttaagcgcgtgacctgtagcgcccgtgaagacgcggtggagtttttcgccaagctggggtttgttaatcagggagaaatcaccacgccaaccaccacgccgattcgccattttttgatgattaagcccgtcgccactctggatgacattctgcatcgcggcgactggtgcgcgcagctgcaacaggcgtggtacgaacatatcccgcttagtgaaaaaatgggcgtgcgcattcagcaatataccgggcaaaaatttatcactaccatgccagaaaccggcaatcagaatccgcaccatacgctgtttgccgggagtttattcagtctggcgacgctcactggttggggacttatctggctgatgctgcgtgaacgccacctcggcggaacgattattcttgcggatgcgcatatccgctacagcaagccgattagcggtaaacctcatgcggtagccgacctcggtgccttaagcggcgatctcgaccgtctggcgcgcggacgaaaagcacgggtgcagatgcaggtcgaaatctttggcgacgagacgccgggtgcagtgtttgaaggcacgtatatcgttctgcccgcgaagccatttggcccgtatgaagagggcgggaacgaagaagagtaactgatggagaggggcggtgctgcctctctcattcaggtcatttatattagtccttggctatttcggttatattaaataagaactctataaatttttattcttcgttggctccatacgtgtcttgctacatcactgttcaggagcatttaaatattatttgtagaactgagtggcaattatcgcagataatgcttaattcatcatcttagttcatgtttgagcgatttttgatagtcaaaaccccctctggtgccatacttttctcataaatatttttaaaatctatagctaacaaatattatgcaaagataatggactagcatcattgtcagtatcattcatttactgctctgtatgttatgaataattatgttgtatgtttgctcttaaaccgtgggaaggaggctataatggttgccaatattaatctcattaaacaagaaagttattctgttgttaatttagaaaaacaactttcccgaactgttaccaacaaaattataacgatgagcaagtaaagaccggttggtggcagtactgaccggtctgtgatgaaagattaatttcaccttaaatcctggtgctgttaggatgctgacgtttttcggctacaccattcagattatgcaaataaatatctctgaatataatatattcatagcacccataattcatcctgggcgataactaaaccatttttgagtaataaatgaaacaactgcaacactcttattatttctggaaaacgcctcgcaaaaacaaaacaacatgcaaaaatccgctttttttaaatgattttccggcgtaattttcgcacatacattaatgagtaatatatgtaaggtattggtaatggcgatgaatacggtttttcttcatttaagtgaagaggcaattaaacggctgaacaagcttcggggctggcgtaaggttagtcgatctgcaattttacgcgaagcggtagagcaatatctggaacgtcagcaattcccggtgcgtaaagcaaagggaggcaggcaaaagggggaggtagttggtgttgatgatcagtgtaaggagcataaggaatgacaaaaatttttcattcttgaatataaaaaacagatgcccttattctggtattaatacaaggctgttttacttgaacttataataactgcaactgttacatcatatctggaaaacgcctcgcaaaaataaaaaatgatgcgtaaatgagctttctttaaagattcggcaagggtacttttctctccatagattcaaaaatgatattggcgagatatttatgaactctctggcaggtatagatatgggcagaattttactcgatttaagcaatgaggtgattaagcaacttgatgatctcgaggtgcagcgtaatcttcctcgtgcggacctattaagggaagcggtagatcaatacctgataaatcaaagccaaacagcaagaaccagtgttcctggcatctggcaagggtgtgaggaagatggtgtcgaatatcagcgtaagctgcgcgaggaatggtaatgggaaaaaatgatgtcaatcagattgctgacaacgtgcgcgttgttcatgccggatgcggcgtgaacgccttatccggcctacaaagtcgtataaattcaatgtattgcagtttattggtaggcctgataagcgcagcgcatcaggcaatcttacgcttgtcatcagtctcatgcccataaccttattgatgtggtggtgggtaaattgaggccaaaccggcactggcggcatagcttgaggtggtaacgcggaatacgagagatggtgtcgtcacaccctatgagctgtaatccgggcgacctgcgccacccggaaaacgtcagagattactctccttcacccggaaacaggaacgggttgatggaactgcgggcatagccttcttgctccattcgtgcgtccagtaccagagaggcgaggtcatctgctacggcttcgatttttggatctttttcctgatagagaattttcaggtaagtgtcgcagtcatcgcagctttcggctttaatcgcggcctgttcgtcatccaggctccagtaatgcagtttgccgctctgctcgcagttgctgcattttacgcgcactacgtgccattcagtttcacacaggttgcagtgcaggtaacgtagcccctgagtggtgccaatttgcaccatgctggacaccggcatagaaccacaaaccgggcaatattgacgttgctcgccgtattcagcgcgggctttgccggggatcagattggccatctgcgcccagtagaggctcagtgcagcccagataaacggcgctttatcgctgctgacggagctgaaatcagaggcaaacagcgcgctggccatatcttccagctcctgagtgcttgccttctccagattctcaatcactgccagcgccgggccgctcatttcaggtttcagctcagcaatcagcgccatcagcagcttttgccagtgcttatcacgcggcagaacgtgaatatccagcgggggcttgccttgtgcgctggcttctttaatgcgcgcagtcagatccatctccagcggatggtcgtacagcaccacttcctgggcgtgggcgataagcgcagcaaagcgcaggtaatcacccagaggattattttctgccagctcgcgcagacgctcggcgcggcggttgtataaattcttgagccgagggaacaataacggcggaatcatatccgccgtacgtttctcgctactacccagctcatcttgcgggattatgcgaatactcattcagctttcttttccgttgtcttgcggacctcacggtaccagcgcgggtgatgtttcttcgcccaggcgctggtaacccatccttccaccatggcggtaatcgtgcctttcacccaaagggcggcgtagatatgcaccatgataaccacaattaacgccactgcggcaaaactatgcagcattaacgcgaatcggatcaccgggatactgaaagcaggcgcaaaataaggacgccagataatcacgccgctcaccagcagcagaaccaggaaaataatcgccgcccagaaaacgcatttctgaccgaagttataacgcccggtgtcacctacttcctcgttgacgacgatcttacgaatattcttcgcccaaaagatatcatcccgattgattaggttgtgatgccagtaacggaaaaacatgatgatgaagctggcaaacataaccacgccgacaaacgggtgcagaattcgcgccagctgcggtgtgcccatgatttgcatcaaccagttgaaggacgggaacaaaaagcccagcccgctcaccgccgccaggatgaagcagaaggcggtgatccagtggttgatacgttccggcgcggtgtagcgcacgatggtgtcacgtcgtttcatttgcgctcctcgtctttctcttcgtgcagattattctcttcctcatccgcacggttcggaccgacacccacgtagtggaagatactggccgcaaaggtagccgcaaagccaacagccgcgagcggtttccagatgcctttccagaatttcacggtttcgctgatttccgggttctccggcaagccatgatacagatttggcttgtcagcatggtgcagcacgtacatgacgtgtgtaccaccgacgcctgccggatcgtacagacccgcattgtcgtaaccgcgggttttcagctcagcaacgcgctcgctcgccagcgttttcatgctctctttcgtaccgaagtgaatcgcgcccgttgggcaggtcttcacgcaggctggttcttgcccaaccaccacgcggtcaacgcacagcgtacatttgtagacgcggttgtcttccgggttgaggcgcggaatgtcgaacggacagcccgcaatgcaataaccgcagccaatgcactgctcggactggaagtcgacgataccgttggcatactgaataattgcaccttccgccgggcacgctttcaggcagcctggatcggaacagtgcatacagccgtctttgcggatcagccattccagtttgtcgttctgctccacttcgctgaagcgcattaccgtccagcttttggcgcttaaatcattggggttgtcgtacaccccaatgttattgccgacggtatcgcgaatgtcgttccactcactacacgccacctgacaggctttacagccgatacaggtggtaacgtcgatgagtttcgccacttcttcctggaagtcccgcgcctgaggcgcgggggtcagaccgttagtcgcggaacgacgaatgatatcttgagattgataagccatatgtcgtctccgttacaccttttccacattcacaaggaaggacttaaactccggcgtctgcgtgttcgcatcaccaacgaatggcgttaaagtattggcaataaagccttttttagctacgccttcatagccccagtgaatcggaataccgatggtatcgatatctttgccgttcgctttcagcgtgcgaatacgtttggtcaccaccgctttggctttgatatagccacggttggaggagactttcacggtatcgccctgggcaatgccaagtttattcgccaggctctccccgatttccacaaactgctctggctgcaaaatcgcgttcaacagcgcgtgtttggtccagtagtggaagtgctcggtcagacgataggtggttccgacatacgggaacttatcggctttacccaatgcttcggcgtcgtctttaaagatacgtgcagccgggttgctgataacgtttggatgcagcgggttagttcccagcggcgtttcaaacggctcgtagtgttccgggaacggaccttccgccatcttatcgagggcaaacagacgccccatgccttcctgctgcatgataaacggcccgacgccgctacccggaggcgctgcgctgtagtccggaatatcccagccggtccacttagtgccgtcccatttcagcaactgacgcttcggatcccacgggttaccctgcggatctgcggaggcgcggttatacagaatgcggcggttaagcggccatgcccatgcccagcccagcgtgttaccgaggccagacggatcggcgttatcacggcgtgccatctggttgccttccggcgtccagctaccggcgaaaatccagcagccacaggaggttgtaccgtcatcgcgcaattgggcgaagctactaagttgttggcctttcttgacgataaccgcaccggttgccggatcggtaatatcggccagcgccttaccgttgctctccatcgccacttcttcactagatggctcatgcggaatggcgtagttccatgtcatgttcagcacctggtccgggttcgcgccaccctgttcggcatacatcttgcgcaagcgcaggaagataccggagaggatctcgccgtcagtcagcgcaatccccggggcgtccgcacctttccagtgccactgtaaccagcgaccactgttaacgatagaaccgttctcttccgcgaagcaggtgcttggcagacggaacacttcggtctggatcttgctgctgtcaacttcgttcagctcaccgtggttctgccagaagttagaggtttcagtgttcagtgggtcgatggtgacgaggaacttcagtttgctcagacaaccgatcactttgtttttgttcgggaaactggcaacagggttaaagccctggcagatatagccattgaccttgccctctttcatcatctcgaagtattgcaggacgtcgtagcctttatcccacttcggcaaccagtcaaagccccagctattttccgccgtcgctttatcaccaaagaaggccttcatcatagagacgaagaatttcgggtagttgccccagtagtttacctggccttccagcagcggttttggcgtgttggcggtaaggtaggtttgcagatcggtctgcttctcgcttggcagcgtcatgtaacctggcaggctctggctcagcagccccaggtccgtcagcccctgaatattggagtgaccgcgcagggcgttaacgccgccgcctgccatccccatattgccgagcagcagctggatcatcgccatcgtacgaatgttttgcgcaccaacggagtgttgcgtccagccgagggcatacaggaagctggcagttttatcgtgagcactggtttctgcgatgtattcgcagactttcaggaacgcgtcttttggcgtaccacagatgttttcaaccacatctggcgtgtagcgggaaacgtgctgtttcagcaagttccacacgcagcgcggatgttgcagcgtggtatcgcgtttggcgaagccgttttcgtccagttcataagtccaggaggatttatcgtacttgcgtttttccgcgtcgtagccggtgaacaggccatcttcaaagccgtaatcctcacgcacgatcaggctggcgttggtataggcttcggtgtattcgcggttgaatttttcattgttcagcaggtacagcaatacgccactcaggaaagcaatgtcagtaccggaacgaataggggcatagtagtcagctaccgccgccgtacgcgtaaagcgaggatcgatcacaatcagcttcgcgccgttgtgaattttggcttccatcgcccagcggaacccgaccgggtgagcttcagcggcgttaccgcccatcaccacgacgaggttggcgttcttgatgtcgacccagtggttggtcatcgcaccgcgaccaaatgttggagcaagacttgctaccgttggtccgtgtcagacacgcgcctggttgtcgaccgcgagcatacccagcgcgcgggagaatttttgcgttaaatagccggtttcgttactgctcgcggaagcacacagcatcccggtggagagccagcggttaacagtcacgccttcggcgttttgcgcaatgtagttagcatcgcggtcttctttcatcagtttggcgatgcgatcaaacgcctcttcccaactgatttgctgccatttatcagaacctggcgcacggtattccggaaacttcagacggctttcggagtggatgaaatccaccaggccagcgcctttcggacaaagtgcaccgcggttgaccgggtgatccggatcgccttcgatatggaagatagatgctttggcgttttttgctccgtcaccgaggctgtacatcaacagcccacagcctacggaacaataggtgcaggtattacgggtttcgcgggtgcgcagcagtttatactgccgggtttccgcgagtgctacgctgggtgcaaaacccagtgccgctgccgtggtgcctgccataccgccagcgcagatcttaaagaactgccttctgctgacctgcatggattgctccttgtttcgacattgtcacgtcccatttacattcgcttgctgcgtgtgcagggagtgggagttatttttctttgcggaaggggccgcaaaggtccagaattggctcaatttccctccatccaggaagggtttgtaacagaataccataatgttggtgtgtgtgttcttatctggttaagagaaagtgaaaaaaacacagcgaaaagaaatcgaaaatgtgacaaatatcacaggtgttcgtcaaattgagttatggcggcgtgatgatttacaacacccacggttagatgaggtcgcggaagaagttcccgttgcgctggtctacaacggcattagccatgtggtgatgatggcgagccccaaagaccttgagtactttgcgctcggttttagcctttccgaggggattatcgaaagtccgcgcgatatcttcggcatggatgtcgttccttcctgtaatggtcttgaagtacaaattgagctttccagccgccgctttatggggttgaaggagcgccgccgggcgctggcgggacgtacgggctgtggcgtatgcggcgtggagcaacttaatgacatcggaaaaccggtgcagccgctaccgttcacccagacgtttgatctcaacaaactggatgatgcattacgtcatctcaacgattttcagccagtggggcaactgactggttgtactcacgccgctgcctggatgttgccatctggcgaactggtcggcgggcatgaagacgtgggtcgccatgtggcgctggacaaactgttaggccgccggagtcaagaaggggaaagctggcagcaaggtgcggtactggtttccagtcgtgccagttatgaaatggtgcaaaagagcgcgatgtgcggcgtagagattttgtttgcggtgtctgccgcgaccacgcttgctgtagaagtggctgagcgctgtaatctgacactggtaggtttttgtaaaccgggtcgggcaacggtttatacccatccgcagcgtttgagcaattaattaaaataagtcctgcgaaatatattaaattgcaggacttattcatttcgtgaattttattattttatttataaacaaaatgcgtgtagtggcgttttcttttttcatttattatgttcactctcttatctatatatttataaggcaattaaatgaaaaggaatttattatcttccgctattatagtcgccatcatgtccctcggtctgacgggttgtgatgataaaaaagccgaaacagaaacgctcccgcctgccaatagtcaacctgccgcaccagctcctgaagcgaaacctactgaagctcccgttgcaaaagcagaagctaaacctgaaacacctgcgcaaccggtggtcgatgaacaagcggttttcgacgaaaaaatggatgtctatatcaagtgctacaacaagttacagatcccggtacagcgcagtctggcgcgttatgctgactggctgaaagattttaaacaggggcctaccggtgaagagcgtactgtttatggcatctacggcattagtgaatccaacctcgctgagtgtgaaaaaggcgtaaaaagtgctgtggcgttaacgcctgcgctgcaaccaattgatggcgtggcggtgagttatatcgatgctgccgtggcgttgggtaataccattaacgaaatggataaatattacacccaggaaaattataaagacgatgcgtttgcgaaagggaaaacgctgcaccagacattcttaaaaaatctggaagcctttgaacctgtagccgaatcttatcatgcggcgattcaggaaattaatgataagcgtcagcttgcggaactgaaaaatattgaagaaagagaagggaaaacattccactactactctctggcagtcatgattagtgcgaaacaaattaataacctgataagccaagataagtttgatgcagaagcggcaatgaagaaagtgtctgaactggaaacgctagtggcgcaggccaaagaagcggataaaggcggcatgaatttcagctttattaatagcgcaggccagtatcaactcgaggctaaaaaatacgttcgccgcatcagagataaagtcccgtactctgactgggataaagagcaacttcaggacgcaaacagtagctggatggtcgaagactctttcccgagagcattacgcgagtacaacgaaatggttgatgactataatagcctgcgttaaacgtttttgatgataaatgcagtgtcggatgcggcgcatccgacacagttcaccccttgtgaagtaactccataaatgcctcatatcctgttaacccggcaataatctccgccggatgctgacacaatatgcttgccagatagctaaatatttttagctcatgacgcgcatcggcggcggcgcaggcgatcaagacatggttaatgacttcgttattcacctcaactggttgggcgagggtaataaaaaatccacgaaaacgtcgctcctgttcgctccagcaatgtgggatggcgaggcgattaacaatcaggttttcaccttcgccttcgcgggcgatgatgcgttgtgcttcatcggcggtaatatggtgttgtgcgactaattgcgcacaaatttgccgggtaatatgttgccagctttcaccgcgtacattgctataatgaaaacttccgggggcagagaaaaaacgctccggctgttggcgaataaatgccgtcgccagaaaatgttttatttgttcgataccggcagccgtaatgatattttttacggtgatgtaattatttaccgcgtcatccagtaaataatggctgttgttaatgatcaataacggctcaatctcttcgcgaatggcaacaagttcgcttaagctacgggcaataattacccgacaatttaaaacatcgcgctcaatggcgagctgattaatagtggcaatcgcgttctggtcgctgagcaaaatgatcggctggcgttcgttttgatgccgctccagcgcacaggcaaaatacaaaccgatcagatcgctgtcgaaaaggggaatatcgagctgttcacgcagtagcgtaataaagtgcagactcatatcaaaggccgcaggccaggcggctttcaggttattcatgctgctctggcggtgctcagcaatccacactggtgcggcaaggcaacgtaataaatgcccggtaatattctcaaccagctgcgcatcaataatattcaaactcgcgatgcccggcaccctttgcagcaacccctgcacattatcggcactaattacctgcgcttgctgatgctgtttctctatcaaacccgtcagggttcttacagcgttatcaccaagaaacagaccgctatgttcaacgatttgttttatctcgtcaccgggatattgcggccactcatcggtcagttgattacgcagggcgtaaatcgccagaatcaggctggagagataatcaccctgcatgagcggccagcggtgttggttgtcgcaggccgtggataaatgctgaaggttgtctcgtgttatgcccgccagcggaattaaaaacggatctttgcgcagcaagttcgccagcaagataacgcgtttctcttctgtctcatcaatgaaatggcccaaaccagggcggctggccaggcaacaagtgcgttcataacgctgttttaaccggggcagacgctctgctacccacgtttctggcaaattaagcgcgctggcgagttgcgcacggggagtgaaagtattcagtaataacagcgccagcagccgatcgtcgttatcgtgcttttgcagcaactgaaaaaagctgcggcgctcgaagatttccagctgatagcccgcactgccactggcgaaaatgcgggctttgccgttaagggtgaagttgagatagtcaatatcacgcaggatggtcctgccactaacgccagtctgttgcgccagctcgccaggcgtgcgcggctgttgctccagcagatcgacaatctttaactggcgttcgtttagcattaatccacctgacggaactggctaaacgcgttgactttctccgcagttaaggtcgtcagaaaaccccgtatcagcgtgagcagagcttcgtaatcggctttactaatcataccgctgttggcgtgcagataacgagttggcagacacagcgcgacaaccggacgcccgccgcccatcacgttgtagcgcccgccatccgtcgcaccggttttcatggtggaaaattgcagcggtaaatcgttatgtgcggcacagctttttaacgctgctaccagtttctggttggggaagtagcgcttgtcaaacagcatcagccccggcccctggcccagtttcagcgggtatttaatgttatcaatgcccggaacatcgcccgctacggcggtatccaacacgatcacgacgtccggtttaatgtgttccgcgctggtttgcgccccgcgtagcccaacttcttcttccacactgccaacgccatacagcgtaatttcgggattattcaccgtctgcaatagttcagccatcattgcgcagccgatgcggttatccaacgccttgccgaccactttatcttcgccccagcaggcaaaattggcttccgggctaataaaattaccaatttccacgccgcgcttttccacctcttcgcgactgttcgcgccaatatcaatgaacatctcatcaaaactcagcggttgttgcttttgcttttccgttaacgcatgaggcgcgacggaaccaatcacaccagggattttcactcccttgtgtgtgcgtatggttacccggtggttgagcatgctctgattccaccagccgccaatggtggtaaaacgcagaaaaccgctctcgtcgatgtgggtgaccataaagccgacttcatccatatgtccgacaacggcaacttttggacctttattccccttacgggcaacaaagctgcccagaccatcgaaggtgatttcattcacgcaaggttccagcgtgtttatcagaatgtcgcgaacttcctgttcatcgccgctgacggcgctggcttcgcacaactgttgcagtaactcaatgttcatggacaagctcctgttgcgcggctttcgctttgcggcgtaaccacaatcctttcaggacgataatgaaactaatgttcagcgcgaggccaatcgccagcaccagataaaagctacccaccgggctcatcaggccgatcagcgggtcaaagatacccaaaccaggtgccagacgtttgattccgaaagcgatcaccagcacgccggtaatgccgcccgccagcgtattggcggtaatcatcggcaacggagctgccagagcgtaaggaatagccggttcggttgcgactgtggcaccgaccacaatggcactactggcagcctctttttcctgtcgggtaaacagtttgggcgcaatgaacgtcgcaagacccgccgcgacgggcggcatcagcgcgacaacgccgacgatggcgtaccagtcataaatgtgtttttccagcagactgaagcagaagaaccaggcggttttattgatggggccgcccatatcgaacgccagcatcgcaccgaccagaaacgctgccgcaaacttcatacttggaggaatggtattcaggaagtggagcagcccgcccatgaggtcggacatcaccggcccgataacgtagtaagtgagcacgccgaaaaccagcagagtaacgaacgggatcagcatactaccgagcagcggttgtaatgctttgccaaggcgcactttgcggaaccagaagacgaaatagccaatcgccagccccagcaccaccgcgccgaggaatcccgcaccgctctgggtgccgagcagcgctttgtcgttcgccagatagcaaaccagaaacgccggagcgaaagccggtttatcggcaatgctgctggcaatataagcgcccatgatggggatcataaaggtgaagccaaggtaaccgatggattcaactacccaggtaaagctcggcgcgcctttgctcatatcggtatacggcaaaccgaactgcaccagcatgttggcaagcgccaccaggataccaccgccgatgacaaacggcagcgccgcagagacgcccgccatcaggtggctcatcacgctaccgctttgcacttcctgtttgccaagcttcacgccgctatctgcggcaaaaagctggctgtttgtcggtaattcgctgaaaatctggtcgatatttttcaacgcctgggagatggcaatctcataaactttcttcccggcaaaccgcgcgcgatcatcaccgctcaggccacgcccggtagcgagaatgacgtaatcggcagcggcaatctcttcgctggataagcggttttcaacgccactggacccttgagtttccacttttatggtatgaccgagagaacgggctttctgttccagggcttccgccaccatgtaggtgtgagcgatcccggcggggcagttggtgatcgcgacaatacgtaaggaactctccatcgccacttccttaactgctgagggtttgatttaacaaggcaagcgcctggtcggtatcgccctgttgcagttgatgaataaattccttgtgaataattttgcgacacagtgtgccgatgattttgacctgatcctcttcgccgctttgcggcacgccgaggcagatccagcaattgacgtcttcgccatcgctggctttccagtcaatagcctgcgctttgcgggcgaataatacgaacggttgtttaacgcaggcgcttttaccgtgcggcacggcgacaccggaaccaaatccagtagagtgcattttttcgcgcagcagcagggtttgcaggaactggtgactgtcggtgataaaaccgttttgtaacgctattgtcgccaactgcttcagaacggaataagcgccattgccctgaatattcaggtcaatacagcttgcagtaagagctgccattaatcggactccataaaatatattttaatcaattgtaatggtggagcgattaagtgatgagaggcgatatgtcggtaaacaatgacaatttgagacagagtgaaaggtcagatttgcggagtaatgcacataatggttatttaaataaaccacatgaatcattaatgggttattcattatttttgtgatttactcacaatgtatcagggaaatataacttaccgggagatgtaatatgtttaatttttcaaatcgaaatttaaaatattgtgccggaggcatctctggcacattgggcaattacggcaggtaaaacacttcttgcagctcgctactcaccgggctgttatccgggttagcgggcataacatcggtcatatatttccaccaacgttggcagacatcagtgctggcaaccgcattccagcgttcttcagattcaatctctaccatggcaaacagcagattacgcgctttgtcgagatagatggcgtagttatgcgcaccgtgagatttcagcactgcttccagttctggccagatgggattatgccgacgctgatactcttcgtgggcgtcggggtttacctgcatgacaaaggctttgcggatcatgtttgctccttacagcgccagcgcactggcgagtggcgtaacgccgaaacgcttgccgagcgctatcaactcttcacggctgatggtctgtttcatgccgcccatgctataaaccttcactaatacttgtgcacttttttctgcggtgtcgattaaaccgaaggtttcatccagcgtcggtccgctgccgaagacgccgtggaagggccacaacaccaggctatgtttttgcatctcttgtgcggtcgcctggccgatttcgtccgtgccgggcaccatccacggcaaaatgccaacgccatccgggaataccaccagacactcggtgctgccttcccccagttggcgagtgaagaccgcggtgtcgttttcaagtacataggtgagggcgatcaggttggtggcgtggcagtgcatgatcacccgatctttgccgttggtggctttaatgcgctcgcagtgggaaaggaagtgagccggaagttcggaagtggggacggcttcgttggttaacccccaaagaatgtggtagcccgcgccgtcgctgtcgacttttacgatgcctaagttagccgcaggatcaagctggacgttacggaagaatttgccgctgccggtgacaataaacggtgtatttgccagtaaaggcatgggctggctgagcgggatatagcgcggttgttggtggaaattgtcgtgatatggtgcgatatcggcgtcatccaggcgtagcgtcaggttgccgccgttgcgctcatcccagcctttcagccaggcgtcggtggtggctttgatcattccctggacaaaccaggactgagtaatgttttgcatgttctgtgttcctgtaaattcggtgttgtcggatgcacgacccgtaggccggataaggcgctcgcgccgcatccggcaatcaatgcctgatgcgacgctgtcgcgtcttatcaggcctacaactattgccgacctgtaggcctgataaggcacttgtgccgcatccggcaatcaatgcctgatgcgacgctgtcgcgtcttatcaggcctacaactgttgccgacctgtaggccggataaggcacttgtgccgcatccggcaatcaatgcctgatgcgacgctgtcgcgtcttatcaggcctacaactattgccgacctgtaggccggataaggcacttgtgccgcatccggcaatcaatgcctgatgcgacgctgtcgcgtcttatcaggcctacaactgttgccgacccgtaggccggataaggcgctcgcgccgcatccggcagtgtttacccgcggcgactcaaaatttctttctcataagcccgcacgctctccagccattcgctacctgctggcgtatcgtgacgttggcaatacatttcccagaccgcctgccacggcaagcttttctgctcttccagcagtgccagacgcgcagtgtaatcgcccgccgcttccagcttgcgcagctcagcggtaggttccagcaacgcacgcagcagggcttttttcatattgcgtgtaccaatgacccacgcggcaatgcggttgatagaggcatcgaagaagtcaaggccgatatgcacccggtcaaacagatcgtgacgcacaatctcactggcaattgcctgggtttcatcatccagcagcactacgtgatcgctgtcccagcgaaccggacggctgacgtgcagcagcaactgcggcacatacagcatggcggcggaaatcttgtcggaaatcacttcagtcgggtggaagtgcccggcgtccaggcacagcgcagtctggcggctggtggcataccccatgtaaaactcattggagccaaccgtgtagctctctgcgccaatgccaaacaatttgctctcaacggcgtcgatatggtgcgcagggtttagcttctcgctgatcacctcatccagtgctgccagcagacgctgacgcggggcgagacggtcaacggtgatatctttcataccatccgggatccagatgttcatcacgcttggtgtgccgagttgctcgccaaaataggcgctaacgcgacggctggctttgcagtgatcaatccagaactggcgaatgctgtcgtcggcatgggaaagcgtaaagccatcggcgcttagcggatggctaaagcaggaggggttaaaatccagaccgagctgattggctttcgcccattcaacccagtttttgaagtgctctggtttgatctggtcgcggctgactggcgtatcactttccagatagatggcatgtaaattaagccgtttcggccccggaatcagccgcatagcctgttccagatcggcacgtagctcactggcattacgcgctttgcccggataattgcctgtggcctgaatccccccggtcaggctaccttccgggttttcaaaaccggaaacatcatcgccctgccagcagtgcatactaacgggtaaacgatcaagttggcgcagcgcctcctcgacatcaatccccaccgccgcgaaacgctgtttcgctagctcccaggcctgttccagttgagtggtcatgcgcaaagctcctttgtctgtcgtgtagagtgaatctgcgccacatagtgggcaatttcactgtcaggattaggggtaaaggtggtcagattcgcggtggtgctgacgacctgacggaaatcatccacattgttgagttcatccagcgtcattaactggatgccgatattgccgagcgtgctggcttcaacaggcccggcgatcacccgaataccgcaggcatcggcgcatagctggttgagcagcgtgttctggcagcctccgccgacaatatgcagttggctgaaatcttcaccgcgcagctgcgccagctcatgcaacacatcggcatacagcagcgccagactgtcgaaaatgcagcgcgccagttcagcatcactttccgggatcggttgcgccgtttcccgacacgcagcctgaatttcgctgcacatcgtctcaggattaataaagcgatcgtcattgggattgataatgaagcggcaagccggaagtgcctgtgtcgcggagataagcgccggaagatcgttgatttgctgctcctgaagcactcgctgaagcagccataagcccataatatttttcagcacccgatagcgaccttccgccccgccttcattggtgatgttggctgccagtgccgtgtcattggtaaatggcgtctggctttcgaagcccatcaaactccaggtgccagaagagagataagcagcacgactgccgtttaacgggctggcgataaccgcgctggcggtatcatggctggcaacggcgaccactggaatctcattaccctgcgggcaaatccagtgacctatgacattacccggatgcgtcgggcgaccaaaccaggctttgttggccccgctccacgccagtaggctctcgtcccagtcgtcgctattgatattgaccagttgcgtggtcgtggcgttggtatattcccagttcatcttgccggtcaggcgataactgaagtaatccggcatcagcagagcgtgagcaatgtgtggaataagttcaggttgttgctccgtcagcgcacgcaactgataaagcgtattgaagggcagaaactggatgccgctacgttgataaatatcgcgtttgccgagttgttgttgtgcctgcgccattaggccattggtgcggctatcgcgataagcaacgggcaggcccacacgctgaccctgttggtcgagcagcacaaagtccacgccccaggtatcaatcccaatgctatcgatacgaatcccttcctcgcacaccttgtttaatccaaggcgaatggcactttcaaggctatccacatcccaggtgacatagccgttctgactatgcagcccattgttaaaacgatggatttcgcgcagcgtcaggctgcggcattcacgctcgtaacgcgccagcatcacgcgcccactggatgcgccgagatcgacggcgacacaattgcgaaaggtcataatgtgatcctgctgaatttcattacgaccagtctaaaaagcgcctgaattcgcgaccttctcgttactgacaggaaaatgggccattggcaaccagggaaagatgaacgtgatgatgttcacaatttgctgaattgtggtgatgtgatgctcaccgcatttcctgaaaattcacgctgtatcttgaaaaatcgacgttttttacgtggttttccgtcgaaaatttaaggtaagaacctgacctcgtgattactatttcgccgtgttgacgacatcaggaggccagtatgaccgtattacatagtgtggatttttttccgtctggtaacgcgtccgtggcgatagaaccccggctcccgcaggcggattttcctgaacatcatcatgattttcatgaaattgtgattgtcgaacatggcacgggtattcatgtgtttaatgggcagccctataccatcaccggtggcacggtctgtttcgtacgcgatcatgatcggcatctgtatgaacataccgataatctgtgtctgaccaatgtgctgtatcgcagcccggatcgatttcagtttctcgccgggctgaatcagttgctgccacaagagctggatgggcagtatccgtctcactggcgcgttaaccacagcgtattgcagcaggtgcgacagctggttgcacagatggaacagcaggaaggggaaaatgatttacccagcaccgccagtcgcgagatcttgtttatgcaattactgctcttgctgcgtaaaagcagtttgcaggagaacctggaaaacagcgcaagtcgtctcaacttgcttctggcctggctggaggaccattttgccgatgaggtgaattgggatgccgtggcggatcaattttctcttagtctgcgtacgctacatcggcagcttaagcagcaaacgggactgacgcctcagcgatacctgaaccgcctgcgactgatgaaagcccgacatctgctacgccacagcgaggccagcgttactgacatcgcctatcgctgtggattcagcgacagtaaccactttagcacgctttttcgccgagagtttaactggagtccgcgtgatattcgccagggacgggatggctttctgcaataacgcgaatcttctcaacgtatttgtacgccatattgcgaataatcaacttcgttctctggccgaggtagccacggtggcgcatcagttaaaacttctcaaagatgatttttttgccagcgaccagcaggcagtcgctgtggctgaccgttatccgcaagatgtctttgctgaacatacacatgatttttgtgagctggtgattgtctggcgcggtaatggcctgcatgtactcaacgatcgcccttatcgcattacccgtggcgatctcttttacattcatgctgacgataaacactcctacgcttccgttaacgatctggttttgcagaatattatttattgcccggagcgtctgaagctgaatcttgactggcagggggcgattccgggatttaacgccagcgcagggcaaccacactggcgcttaggtagcatggggatggcgcaggcgcggcaggttatcggtcagcttgagcatgaaagtagtcagcatgtgccgtttgctaacgaaatggctgagttgctgttcgggcagttggtgatgttgctgaatcgccatcgttacaccagtgatagcttgccgccaacatccagcgaaacgttgctggataagctgattacccggctggcggctagcctgaaaagtccctttgcgctggataaattttgtgatgaggcaagctgcagtgagcgcgttttgcgtcagcaatttcgccagcagactggaatgaccatcaatcaatatctgcgacaggtcagagtgtgtcatgcgcaatatcttctccagcatagccgcctgttaatcagtgatattagcaccgaatgtggctttgaagatagtaactattttagcgtggtgtttacccgggaaaccgggatgacgcccagccagtggcgtcatctcaatagccagaaagattaattcgccatgccgatgccgacgatgttagcggcgacaataatcaccacacaaccgaggctcaacaccgttaccggacggcgtcctgcattgttccactctttcagcaccagcccgacgataccgccgcacaatacatagaaactcatatgcagcatccaactgatgtagtcatactgcgccggaatgcgggcgtggccccaggcatagaaaaagaattgcagataccacatcaacccgcccagtgtgctgagtaacacattgtgaatgatcaggctttttgccaggctgaagtcggcttttaggctcaaatccttcacttttgccagacgaataaaacagaaaccgaggttaatgatcgcgccgccgcccatgatgacaacatagcttggcagagcgacatacagtggatcgacgccaagtgcggcagcggcttcatgcatcggttttgcggcgttcatcgcaaaggacatcccggcagagaaaatgccgcacatcaccgccagcaccagcccttttttcagattgaactcttcggctttaatgcccatcttgcgctctttcaactgcccggcgcgagttacaatccctacgccaatcagcgccaccagaacgccgagcaacgtcatgcgtccgccttcggtgctaatcaacacatcgaaattgccgttgataattggcgtcatcagcgtaccgacaatcaacgtaatgccaatggcgatgccaattcccatgctcatgccgagataacgcatggtcaggccgtagttgatattaccgatcccccacatagcgccgaacagaaaaacaggcagtcgcgtagagagactaaagctgctgtaatacgcccagaaattcggtagtaacagggcgctgatggcccacggcagaataatccagctaacaatcccaccgacactccacatggtttcccaactccatttttttacttttttgaacggagcgtaaaaacaggctgcactggccgcgccgatcaaatgccaaaatatccccatcgtaatcgcgttactcatcttcttatcctcatcatttttcgtcgcgtcacatctccgacgagatgagtgtaaaaatcgtgctgtcgattaacctttcgcctgttgccgccgttgtcgatttactggcaatcacggcattaagtgggtgatttgcttcacatctcgggcattttcctgcaaaaccatacccttacgaaaagtacggcattgataatcattttcaatatcatttaattaactataatgaaccaactgcttacgcggcattaacaatcggccgcccgacaatactggagatgaatatgagctataccctgccatccctgccgtatgcttacgatgccctggaaccgcacttcgataagcagaccatggaaatccaccacaccaaacaccatcagacctacgtaaacaacgccaacgcggcgctggaaagcctgccagaatttgccaacctgccggttgaagagctgatcaccaaactggaccagctgccagcagacaagaaaaccgtactgcgcaacaacgctggcggtcacgctaaccacagcctgttctggaaaggtctgaaaaaaggcaccaccctgcagggtgacctgaaagcggctatcgaacgtgacttcggctccgttgataacttcaaagcagaatttgaaaaagcggcagcttcccgctttggttccggctgggcatggctggtgctgaaaggcgataaactggcggtggtttctactgctaaccaggattctccgctgatgggtgaagctatttctggcgcttccggcttcccgattatgggcctggatgtgtgggaacatgcttactacctgaaattccagaaccgccgtccggactacattaaagagttctggaacgtggtgaactgggacgaagcagcggcacgttttgcggcgaaaaaataatcatttgccgcctgctgcaatgaggcgtataggccgcatatcagcttaaaaaatgaaccatcgccaacggcggtggtttttttgtgatcaatttcaaaataaaaacaatgatccgataaaaataaaacagcgtttcaattgatgtggttttgatcacttttattgattaaatgaatgtctatcttcgtttccatcaacactgatgctccattgaggaattacgcatcagcccttaaaaatatgccgacaggtgatggaaatgcagataaagcgcagcattgagaaaatcccggggggggatgatgctcgtcccgctattccttggcgcactgtgccacaccttcagcccgggggcggggaaatattttggaagtttcaccaacgggatgattaccggtacggtgcccattctggcggtgtggtttttttgcatgggggcgagtataaaattaagcgcgacgggaacggtactgcgtaaatccggtacgctggtggtaactaaaattgccgtcgcgtgggtggttgcggcaattgccagccgtattattccggaacatggtgttgaagttggattctttgccggacttagtacgctggcgctggtggcggcgatggatatgaccaatggcggactttacgcttccatcatgcagcagtacggcacaaaagaagaagctggggcatttgtgttgatgagcttggagtccgggccgctcatgacgatgattattctgggcactgccgggattgccagctttgaaccgcatgttttcgtcggcgcagtattaccgttcctggtgggctttgccctggggaaccttgaccctgaattgcgagaatttttcagcaaagcggtgcaaacgctgattccattctttgccttcgcgctgggcaataccattgatttgactgtgattgcccagactggtttgctggggatcctgttgggtgtggcagtaattatcgtgaccggtattccgttgattatcgccgataaattgattggcggtggcgatggcactgccggaattgccgcttccagttccgcaggggccgcggtagcgacacctgtgctgattgcagaaatggtgcctgcgtttaaaccgatggctccggcagcaactagcctggtagcgacggcggtcattgtgactagcattctggtgccaattcttacctctatctggagtcgtaaagtcaaagccagagcagcgaaaatcgaaattttaggtacggtgaaataaacctgcttccttaatccccacagccggatgaactaacgttcgtccggtttgctattgagttcctgcctggatacttaccgcgaaaacagcacgcctgacataaaataaatatggtctaatggggaaatttctcgtggagagggaacagatgcgatatccggttgatgtatacacaggcaagattcaggcttatcccgaaggcaaacccagcgcaattgctaaaatccaggttgatggtgagttgatgctgacggagctggggctggaaggtgacgagcaggcggagaaaaaggttcacggcgggccagacagagcgctgtgtcattatcctcgtgagcattatctctactgggcgcgggaatttccggaacaggcggagttgtttgttgcgcctgcgtttggtgaaaacctcagtaccgacggcctgacggaaagtaatgtttatatgggcgatattttccgctggggagaggcattaattcaggtcagccagccgcgcagcccttgctataaactcaattaccattttgatatcagcgatatagcgcagttgatgcaaaacacaggtaaggtggggtggttgtatagcgtgatagcgccagggaaagtgtctgcggacgcgccgctggagttggtttcccgtgtcagcgatgtgaccgtgcaggaggctgccgccatcgcatggcatatgccgtttgatgacgatcaatatcaccgtttactctccgctgccgggttaagcaaaagctggacgcggacgatgcaaaagcgccgactgagcggcaagatcgaagatttttcccgccggttgtggggaaaataacccccggagtgtaggcctgataagacgctatcagcgtcgcatcaggcatcctgctcaaatgccggatgcggcgtaaacgccttatcctgcctgcaaatgcgaagtttaactccgcttatacagcggcaaccaaatcaccagccgtaaaccgcccagcgggctgtcttctgccttcacccagccacgatgctgctgaatggcggtttcaacaatcgccagccccaaacctgtaccgccagattcacgatcgcgtgcttcatcggtacgatagaacggacggaaaatctgttcgcgatcttccgggctaacgccaggaccatcgtcgtccaccgtaatggtgataccgtctttatctaccgcaaagcccacttcaatcttcgtatgggaataacgcagagcattacgaacaatgttttccagcgcactttccagggcgttcggattgccgtacagcggccacggcccaggcgggaagttaactgtcaagctcttgcccatttgctcggcttcgaacgccgcgttatccagcacttcactccacaactggttggctttgatggtttcgctaaccagcgcgtttttttgctgattacgactcatcaccaacagatcgttgatcatgctgtccagacgttgcgcttcggtttcaatacgctccagttccttgctttcaccgctacgacggcgcagtaacgccgtacccagttgcagacgcgtcagcggggtgcgcagctcgtgagagatatcagaaagcagacgctgctgagaggtcatcatgcgctccagcgcggtgaccatctggttaaaactggcacctgcggcaaggaattcctgtggccccgcttccagttccgggtgctggcgtaagtttccctgggcaacttcatcggcagcgtttttcagcttacgcgccggttttgccagactccaggccaaccacaacagcagcggcgtactgaccaacatggtgacaatcagcagtaatagcgggcggtcaaacagtaagttaatgaaatcggattgagaactgctggccggacgaatcagataaagttggtaattatcttcgccatcacgcacggagaacggaccgaccagttccacgcggccatactttttcttctgcggatgatcggcgttatcggcctgaccaataaagttacgaatgatctgcatttcgctgcgttcagcgccgatcacgcggccttcggtggtcaccaataacaaacgctgtcctggcggtgcccacttatcaatcgcccggaacagacgccgccaccacattaaatcgttgggcggatcgttcgccagctccgcttcgacatgctgctcaatcatcagcccctgacgctgttcgctatccagaagctcggtcatctggcgactatcgagcttgggtaacatcaaaaccaacatcaacaccagcgccagcgtcagccagaagatggcgaagatgcgcgcggttaagctgcctatcatgaagcagaaaccatcagatattagctcaactagcagaaaccatcagatagccgcgaccacgcaaggttttaaaccacgggtgaccatctttacgatccggcagtttacgacgcaggttggaaatgtgcatatcaatagcgcggtcgaaaggcgtcaggcgtttgcccaacacttcctggcttaaatgttcacgggaaaccacctgacccagatgctgtgccagcaaatagagcagggtaaactcagtaccggttaactccagcgtttgcccgtcgaagctggcttcctgacggcctggattcagcactaaggcatcaacttccagtgtcggactaccgttgtcgttgttttgctgttgctcgctccagtggctacggcgcaggatcgcgcgaatacgtgccaccagctcacgatcattaaacggtttcgggagatagtcatctgcgcccagctcaaggccgagaacgcgatcaagttcactgccgcgcgccgtcaacataatgacaggcgtctggtgtgtctggcgaagtgcttttaatgtgtcgataccatttttcttcggcatcattacgtcaagcaaaagtaaatcaatgctgtcgtccagaagatcaagcgcctgttccccatcgtgggcaacaatcacgttgaagccttccatctcgagcagctcctttaatagggaagtcagctctcggtcatcatcaactaacaggattttattcattgtttaaatacctccgaggcagaaattacgtcatcagacgtcgctaatccatgactttacgttgttttacaccccctgacgcatgtttgcagcctgaatcgtaaactctctatcgttgaatcgcgacagaaagattttgggagcaaatgatgcgcatagttaccgctgccgtcatggccagtacgctggcagtcagtagtttaagccacgctgctgaagtcggtagtggcgataactggcatccgggtgaagaacttacgcagcgcagtacgcagagccatatgttcgacggcataagtttaaccgaacatcagcgtcagcagatgcgagatcttatgcaacaggcccggcacgaacagcctcctgttaatgttagcgaactggagacaatgcatcgccttgtcaccgcagaaaattttgatgaaaacgctgtgcgcgcacaggcagaaaaaatggcgaatgagcaaattgctcgtcaggttgagatggcaaaagtccgcaaccaaatgtatcgcctgttaacgccggagcagcaagcggttttaaacgagaaacatcaacaacgaatggagcagttgcgtgacgtgacgcaatggcaaaaaagtagtagcttgaagctattgagtagtagcaacagtcgttcccagtaataaaccctgttttccttgccatagacaccatccctgtcttcccccacatgctgtgggggtttttttatcctcaatttgcctgctgcttaatgcattgcagatgatttgcttccgttatactagcgtcagttgatagcgggagtatttatgaatcaatcttatggacggctggtcagtcgggcggcgattgctgcgacggcgatggctagcctgctattgctgattaaaatttttgcatggtggtataccgggagcgtgagtattctcgccgcgctggtggatagcctggtggatatcggcgcgagcttgacgaatttattggtggtgcgatattccctgcaacctgccgacgataatcacagctttggtcacggtaaagctgagtccctcgcggcgctggcgcaaagtatgtttatctccggtagcgcactattcctgtttttgacgggtattcaacatctgatatctccaacaccgatgacagatccaggcgtcggggttatcgtgacaattgtggcgctaatttgtacgattatccttgtcagctttcagcgttgggtggtgcggcggacgcaaagccaggcggtgcgggctgatatgctacattaccagtctgatgttatgatgaacggcgcaattctgctggcgctggggttgtcctggtacggctggcatcgcgccgatgctctgtttgcattgggaatcggcatctatattttatatagcgcgttacgcatgggatatgaggcggtacagagtttactggatcgcgcattgcctgatgaggaacggcaagaaattattgatatcgtgacttcctggccgggtgttagcggcgctcacgatcttcgcacgcggcagagtgggccgacccgctttattcagattcatttggaaatggaagactctctgcctttggttcaggcacatatggtggcggatcaggtagagcaggctattttacggcgttttccgggaagcgatgtaattatccatcaggacccctgttccgtcgtacccagggagggtaaacggtctatgcttagttaatcagtataaaagagagccagacccgcattttgtgtataaaataccgccatttggcctgacctgaatcaattcagcaggaagtgattgttatactatttgcacattcgttggatcacttcgatgtgcaagaagacttccggcaacagatttcattttgcattccaaagttcagaggtagtcatgattaagaaaatcggtgtgttgacaagcggcggtgatgcgccaggcatgaacgccgcaattcgcggggttgttcgttctgcgctgacagaaggtctggaagtaatgggtatttatgacggctatctgggtctgtatgaagaccgtatggtacagctagaccgttacagcgtgtctgacatgatcaaccgtggcggtacgttcctcggttctgcgcgtttcccggaattccgcgacgagaacatccgcgccgtggctatcgaaaacctgaaaaaacgtggtatcgacgcgctggtggttatcggcggtgacggttcctacatgggtgcaatgcgtctgaccgaaatgggcttcccgtgcatcggtctgccgggcactatcgacaacgacatcaaaggcactgactacactatcggtttcttcactgcgctgagcaccgttgtagaagcgatcgaccgtctgcgtgacacctcttcttctcaccagcgtatttccgtggtggaagtgatgggccgttattgtggagatctgacgttggctgcggccattgccggtggctgtgaattcgttgtggttccggaagttgaattcagccgtgaagacctggtaaacgaaatcaaagcgggtatcgcgaaaggtaaaaaacacgcgatcgtggcgattaccgaacatatgtgtgatgttgacgaactggcgcatttcatcgagaaagaaaccggtcgtgaaacccgcgcaactgtgctgggccacatccagcgcggtggttctccggtgccttacgaccgtattctggcttcccgtatgggcgcttacgctatcgatctgctgctggcaggttacggcggtcgttgtgtaggtatccagaacgaacagctggttcaccacgacatcatcgacgctatcgaaaacatgaagcgtccgttcaaaggtgactggctggactgcgcgaaaaaactgtattaatgatttcggaaaaaggcagattcctttaccctgaaaccgatgacagaagcaaaaatgcctgatgcgcttcgcttatcaggcctacatgaattctgcaatttattgaatttgcaaacttttgtaggccggataaggcgttcgcgccgcatccggcatggacaaagcgcactttgtcagcaatatgaggcggatttcttccgcctttttaatccctcaacatatacccgcaagttatagccaatctttttttattctttaatgtttggttaaccttctggcacgctttgctcatcacaacacaacataagagagtcgggcgatgaacaagtggggcgtagggttaacatttttgctggcggcaaccagcgttatggcaaaggatattcagcttcttaacgttagttatgatccaacgcgcgaattgtacgaacagtacaacaaggcattcagcgcccactggaaacagcaaactggtgataacgtggtgattcgtcagagtcacggtggcagtggtaaacaagcgacgagcgtaatcaacggtattgaagctgatgttgtcacgctggctctggcctatgacgtggacgcaattgcggaacgcgggcggattgataaagagtggatcaaacgtctgccggataactccgcaccgtacacttccaccattgttttcctggtacgtaagggaaatccgaagcagatccatgactggaacgatctgattaaaccgggtgttagcgtgatcacgcctaatccgaaaagctctggtggcgcgcgctggaactacctggcagcctggggctacgcgctgcatcacaacaacaacgatcaggcaaaagcacaggattttgttcgggcactgtataaaaacgtcgaagttctggattctggcgcgcgtggctccactaacacttttgtcgagcgcggaattggcgatgtactgattgcctgggaaaacgaagctctgctggcagcgaatgaactggggaaagataaattcgaaatcgtcacgccgagtgagtctatcctcgcagagccaaccgtgagcgtggtcgataaagtggtcgagaaaaaaggtactaaagaggtggcggaagcctacctgaaatatctctacagcccagaaggtcaggaaattgccgcgaaaaactactaccgtccgcgcgacgctgaggtggcgaaaaagtacgaaaatgcgtttccaaagctgaagttattcaccattgatgaagagttcggcggctggacgaaagcgcaaaaagagcattttgctaacggcggtacgttcgatcagatcagcaaacgctgatttccccaggataattatcaaacccggtggtttctcgcgaccgggttttttatttgtcacgattttgcgttacccttgcatctctttgaggtacagggaaaaaaagatgaaaaaagcgggtcttctttttttggtgatgatagttatcgccgttgtggctgccggtattggttactggaaattaaccggtgaagagagcgatacattacgtaagattgtccttgaggaatgtttgcccaatcagcagcaaaatcaaaatcctagcccatgtgcggaagtcaaacccaatgccggatacgtggttttaaaagatcttaatggcccactgcaatatctgttgatgccaacgtatcgtattaacggtactgaaagtcctttgttgaccgatcctagtacgccgaacttcttttggttggcttggcaggcgcgtgattttatgagcaaaaaatacggccagccggttcccgatcgcgcggtttctttggcgatcaactcccgcaccgggcgtacgcaaaaccattttcatattcatatctcttgtattcgtcctgatgtgcgcaaacagctggataacaatctggcgaacatcagcagccgctggttgccactgccaggtggtttgcgcgggcatgaatacctggcgcgtcgggtaacggaaagcgaactggtacaacgcagcccatttatgatgctggcagaagaagtacctgaggcgcgggaacatatgggacgctacgggctggcgatggtacggcagagtgataacagttttgtattgctggcgacacaacgaaatctactgacgcttaaccgtgctagtgccgaggaaattcaggatcatcagtgtgagattttgcgttaaggcgaagagttaaggaaagtaagtgccggatatgaaatccggcacctgtcagacttaagcctgtttagccgcttctgcagctttaacgattactgcgaaggcgtcagctttcagagaagcaccaccaaccagcgcgccgtcgatatccggctgagcaaacagttctgcagcgttagacgcgtttacagagccgccgtactgaatgatcacttgttcagcgatgttagcgtcaactttagcgatgtggtcacggatgaatttgtgaacagcctgtgcctgagccggagttgcagatttgccagtaccgattgcccatacaggttcgtaagcgataaccgcaccttcgaatgccgcagcaccctgagttttcagtaccgcgtcgatctgacgtgcgcaaacttcttcagttttgcccgcttcattttcagcttcggtttcaccgatgcacagaaccggagtcaggccctgctctttcagcaccgcgaattttttcgcgatcagttcgtcagattctttgtggtaagtacgacgttcagagtgaccgatgatgatgtactgtgcgccgatgtctttcagcatagcagcagaggtttcaccggtgaatgcgccggacaggttcaggtccacgttttgcgcacccagcatgatgtggctgccttcagcttcgcgcttcgccatatcgatatacatttccggtggtgcgattgcaaccgcacagccagcaacacctgccagctctttacgcaggttagaaaccagctcgtgaaccatgtggcggctgccgttcagtttccagttacccatcactaaaggatgtcgcattttaattctccacgcttataagcgaataaaggaagatggccgccccgcagggcagcaggtctgtgaaacagtatagagattcatcggcacaaaggctttgctttttgtcatttattcaaaccttcaaggctttcagatagcgccagcttaatcggttcaacagcgaaggtcagccccttttcgccgttgtccgcgacaacataacgcagtgcaccttctgtctcggtgtaataacgtttgtttttccccgccgttagtaggctctgcagttttttctggctttgtgttttggtcattaatggggtgagtgtgcggatcaccgctgccatgtattcctgagctttcgctttcgcggctttttgctctggcccctggatgggtagccaggtcatttgaatgcttttgatttttaaggtaccgcgctccagcgctgtagaagcatacaagttctcattaattttacttgcagcacgagtgagattggctttgtcgggactgctgtcgatggcacgaaattcgttcagtggcaggctgggattctggctgttaaagtcttctcgaaactggctgatggagagatcgaaagtaggggctccagccagcagataaggcgcggtcgttgccgtatctggtgtttgtgcatgcgcctctgttgtaacggttaatgcagaacataagagaaaaaacagcgtacaccctggcttcattgacagtaccttttgttatgactggctccgattaaaacgatatctgtcgcccttgtcaaaagggtagaatcctggaaaagacaaccatcaaggaacttacatgaccatacagcaatggttattcagttttaaagggcgtattggacgccgtgatttctggatttggataggcctgtggttcgcaggcatgctggtgcttttcagtctggcgggtaagaatctactcgatattcagaccgcggcgttttgccttgtgtgcttgctctggccaacagcggcagtaactgttaagcgcttgcatgatcgcgggcgttccggcgcatgggcatttctgatgattgtggcgtggatgctgctggcgggtaactgggcgattttaccgggtgtctggcaatgggcggtggggcgttttgtcccgacgttgattctggtgatgatgcttatcgatcttggtgcgtttgttggcacacaaggcgaaaataaatatggtaaagatactcaggatgtgaagtataaagccgacaataaaagtagtaattaacctttaatatatctcttactgctatttttttccgggattgttatttccacgatgcaaatgacaatacccggaaaatccttctgaactcttcaccttaagcaatatcaaaaaaaatggtaatccataagatcattacttgtttgttcttcccttaacggcgcattattcttaagtcgtaatcgacagagaggcgaatatacagaggtgccctatgaaagatgtcgtagataaatgcagtactaaaggatgtgcgattgatatcggtacggtgattgataacgacaactgtaccagtaagtttagccgcttttttgccacccgcgaagaagcagagtcttttatgaccaaactgaaagagcttgccgccgctacatcctctgcagatgaaggggccagcgtggcctataagattaaggatctggaggggcaagttgagcttgatgcggccttcactttcagttgccaggccgagatgattatttttgagttaagtctgcgtagcttagcttgatggagttgctttagaaggagttaaacatggcttataaacacattggcgtggcaatttccgggaatgaagaagatgccttactggtgaataaagccctggagctcgccagacataatgacgctcacctgacgttaattcatattgatgatggcttaagcgagttgtatccgggtatctacttccctgcaacagaagatattcttcaattgttgaagaataagagcgataacaagctgtataaactgacgaaaaatattcaatggccgaagacaaaactgcgtattgaacgcggagaaatgccggaaacactgctggaaattatgcaaaaagagcagtgcgacctccttgtctgtggtcatcatcacagttttatcaaccgtttgatgccggcatatcgcgggatgatcaataagatgagtgcggatttgctcatcgtgccgtttatcgataagtaaccgcttaccagtaatgctccgctgtcatatggcccggtcggcgacgtaaatgtttcgtcatctgccgggtctctttcagcaactgttgtgtatcgcgcaccatctgtggattgccgcacagcatcacatggctggtttctttattcatcggcaggccaatcgtgctttccagttccccactttcaattaatgccggtatccgtccggtgaggctccccgctgccgtttcccgactgaccaccgtctgaatgcgcagttttccttcgtagcgtttttccagttcctgcatcagtggcaaatagcttaagtcggcggcataacgtgcggcgtgcaccaggaccagatttttgaagcgatctaaatctttacctagttgcagaatgcttaaataagggccaatcgctgtaccggttgccagcatccatagcgtttcgcagtgcggcacttcatcgagcacaaagaatcctgccgcttcgctaaccacctgcacttcatcgcctggtttcagtgccgccagtcgtgggcttaatttgccatcggggacggtgaccaggtaaaactccagatcgggattatcggggctgtttacataggagtaggcgcgctggacgcgttcgccgtcgatttcaaggccaagcttggtaaattgcccggcggtaaacggaagcacgggggcgtgaacggtgagactaaacagggcgtcggtccagttctgcactttagtgactttgcctgttacccaatcagccatgtttttctcctgttttgattgacttgccttatcttcgttctccgaacaaaaaaattccagtcccgaaggactggaaggctcaatcgatcaaatcaatcagaggatgtgcacctgcatttccgggtctttgcgatccagatagtggatggactgaatgcggcgaatggtgcgactcttgccgcggatcagcagcgtttcggtagtcgcgatattgcctttgcggctaatgccttccagcagatcgcctttggtaataccggtggcagagaagatgacgttatcgctgcgcgccatatcgcccaggcgcaatactttaccggcttcgatgcccatcgctttgcagcgtgccagctcctgctcgccaatgcgacgattctcttcgttgtcgcctttgacgtcatgacgcgccagcagacgaccgttcatgtcgccatctaatgcgcggatcaccgccgcagaaactacgccttccggcgcgccaccaataccgtacagcacgtcaacttcgctgtctggcatacaggtgagaatactggccgcaacgtcgccgtccggaatagcaaatacgcgtacgccgagttgctgcatttcagcgataacggcatcgtggcgtggtttagccagaatcgttaccgtcagttcgctcaacggtttgccgagcgccgccgctacattgcgcaggttatccgccagcggcaggttcagatcaatggtgcctttggctcccggcccgacaatcagcttctccatatacatatccggcgcattgaggaagcagcctttatcgcctactgccagcaccgccagcgcgttagcctggcccatcgccgtcatgcgcgtgccttcaatcggatcaacagcaatatctaccgcgtcgccgcgaccagtaccgactttttcaccaatgtagagcatcggtgcttcgtcgatttcaccttcaccaatgacgatggtgccgtcaatgttgacctggttgagcataatacgcatggcgtttaccgccgcgccgtccgcggtgtttttatcgccgcgtcctaaccatttgtagccagccagcgccgcactttcggtgacgcgggaaaattcgatggcaagttctcgtctcatagcaaactctaagcagtaaggaatggcgcgaagtgtagcacaggggaagggagggattattgatgtgtgcggggttgcccccgcacgtttcgggactaccggatgcggcataaacgcttcattcggcatttacattattcgtcgtgttcttcccacgccatcgcgcgtttaaccgcttttttccagcctgcgtaacggtaattacgctcagtggtttcgatgcctggacggaactcgcgctcaatcaccgctttctcttgcagctcgtcgaggttctgccagaagccaaccgccaggcctgcgagataggccgcacccaatgcggtgacttcgcgcacttccgggcgctcaacgcgggtgccgagaatatcggactggaactgcatcaggaaattgtttgctactgcgccaccatccacgcgcagggcgtgcagacggataccagagtcggcctgcatcgcttccagcacgtcacgcgtctgataagcaatagactccagcgtcgcgcgtataatgtggttagcgttcaccccacgagtcagaccgaaaatcgccccgcgcgcatacgggtcccagtacggcgcacccagcccggtaaatgccggaaccacatacacaccattggtgttttgcactttggtggcgaaatattcggaatcgtaggcgtcgttaatcaacttcatttcatcgcgcagccactgaatggatgcgcctgccataaacaccgcaccttccaacgcatagttcacttcgccagtcgggccgcaggcgatggtggtcagcaggccgttttcacttttcaccgctttctcgccagtgttcatcagcataaagcagccagtgccataggtgttcttcgccatcccttctttcacgcacaactgaccaaacagcgcggcctgctggtcaccggcgatcccggagattggaatacgcgtgccgcctttgccgccaatgttagtctgaccgtatacttcggaagaacgacgcacttctggcagcatctcgcgcggaatatccagcacttccagcattttgtcgtcccagtccagggtatggatgttgaacaacatggtacgagaggcgttggtgtaatcggtcacatggacacggccctgagtcattttccagataagccacgtatcaaccgtaccaaacagcaattcaccacgacgtgcacgctcgcgagagccttccacatggtcgaggatccacttcactttggtgccagaaaagtacgggtcaatcaccagaccggtattgctgcggatataatcttctaaaccgtcacgttttaaatgctcgcagatttctgcggtacgacggcactgccagacaatggcgttatagataggcttgccggtttctttttcccagacaatagtggtttcacgctggttcgtaataccgatagctgcaatttgatcggaactgatatcggctttcgccagcacttctaccagcgtggagctttgggtggcccagatttccattgggtcgtgttctacccaacctggttttgggtagatttgctcaaattcgcgctggctcacgctaatgatattggcatcgtgatccattacgaccgcgcgggagctggtggtgccctggtcgagcgcaacgatatattttttttcagtcatgtttaattgtcccgtagtcatattacaggctagctttttgttcactaggagttgtggtttccttttcttccacaacacagatatcgcaaggcaaatggcgaccaatcagtttgcggtaggcaaatgcacctacaatcgcgccaacgatagggccgaaaagcggcaccaggaagtaaggaatgtctctgccgccggtaaaggcgacattgccccagcccgccagccaggcaaagactttcggaccgaagtcacgcgctgggttcatggcaaaacctgtcaatgggcccatagatgcgccaatgaccgcaatcagtagaccaatcagcaagggagccaaagggccgcgtggtacaccgttgccatcgtccgttaacgccaggatcagccccatcagaatagcggtaatcaccatctcaactgcgaaagcctgcacaaaattgatatgaggattagggtaagtagagaaagtgccagccagatcaacactttcaacgctgccgcgaacaatgtgatgagtctgctcgaagtcgaaaaataaattgtagtaaagcccgtaaactaaagccgcagcacagaaagcgccggcaacttgactaacgataaaaggaataactttgcgcttgtcgaaacaggcaaacagccacaatgcaatggtaacagcgggattaagatgcgcgccggaaacccctgcggtcaggtagatggccattgccacccccagtccccaaatgacactgatttcccactgaccaaaagacgcaccagcgacttttagtgctgcaacgcaacccacaccgaagaaaatcaacaacccggtaccgaggaattcagcaatgcactggcctttcaaggtacttgtttgactcataatcggatcctgaagagttaatgtttgttgtatgcgtgaaagtcacggacctccacgatgcttgtaggcatgctgtaaacttatcgttaacgagcaaaaacgagaaatatcgaacttaaaatgtgtgtgcctcgtcataaaatgagcgttatcgcgccatttattccatctgattgtacatgatgcatgtttgttagatcattcgcgcaacaaatttattaacattttcgattgatgtggattatgtcaccaggagaaggatgaaaagtgtggcaaaccgtaatctgcaaggcgtgccgctggacagcgatggcgcggcttcatacaatcggagctaactaaagtgcgctcgtatttattaaggcgtcaccggtaatcgggacgaggatttttatccatcaacgccttgcaattcaggagaggtatgacaatgagtttagaagtgtttgagaaactggaagcaaaagtacagcaggcgattgataccatcactctgttgcagatggaaatcgaagagctgaaagaaaaaaacaacagtctgagccaggaagttcaaaatgcccagcatcagcgcgaagagctggagcgtgagaacaaccatctgaaagaacagcagaacggctggcaggaacgtctgcaggccctgctgggtcgcatggaagaggtctgattacgcttcatcttccgcgtaatttctttactgtgtaggccaacaggtaacgcagaaaaaaggcaccttgcggtgcctttcttatcattcaatatccagcggatcttcactaagaataatcccggtattgtcggcataaagatggtcgccggagaagaaggtgacaccgccaaaattgacgcggacatcgctttcgccaatgccttcgccagcggcaccaaccggaattgccgccatcgcctggatgccgatatccaactcttccaggtcatctacctgacgcaccgcgccgtaaatgaccagaccttcccattcattttgtactgccagacgcgccagttcagcatcgaccagtgcgcgacgaacagaaccaccgccatcgacgacaagaacacgaccacggccattctgttcgagcagatcgtacagcaacccgttgtcctcgaaacattttaccgtgattatttgtccgccaaagctcgcccgtccgccaaagttggagaacagcggttccacgacgttaacatcttcttgatagatgtcacaaagctcggaagtatcgtatttcataggcttaacattcagttgctgcgagaattttcagtatatcgcgctatgtgggctgttggcaaaatcatcaattgttaattgatatttgtcagttatgctgcccactggcttaggaatatccctaaaacaaacagcaggttagtcagtaacgctcccttgacagtacgttccagcattggtcgcatcgccaccgggtccatttcccgcatcacataacgggcttgcttcaccagtaatggtgccgccagcaggaacagccagccccacaggctatgcaggctaaagagattaaacagcgccagacacaccaggctgcccatcagcaggcaggcatgataacgacgcgcgttcacttcacctaagcgcaccaccagcgtgtttttgccattttcgcggtcgctattgatatcacgcaggttattaatattcagtactgccgttgccagcaggccgcatgcggtcgccggaaggatcagtgccggaatcaatgtatgagcctgtaaataccagctccccatgacactcaaccagccaaagaaaaccagtacggaaatatcacccagaccgatataaccataaggacgattgcccacggtgtaggtgatagcggcaatgatgctcaacccgccaagaatcaggaaaccgacaaaatcggccagcgtatggcatgccactgcaaccagtgccagcccggagagacagatgagcacgacggtaataatgagcgcccgtttcatctcttgctgggtaatgacccctttttgcatgccgcgtagcggcccaatgcggtcaggtttatcgctgccttttaccgcatcgccgtaatcattggcgaggttagaaaggatctgtaatagcccggcggtaattagtgccagcagggcgaccagcggatcgaagtgaccttgccaccatgccagcgctgtcccgacgataattgcagcaaaggcgagggggagggttttaggtcgtaaactttccagccacgcctgagttcggctaatttgttgttcagtcataatacgcgccaataaaaatggggcctttcagccccatcaaacaatgatgaaaatgattgaacgcgattataggataaaacggctcagatcttcatctgccaccaacgcatccagatgtttgctcacataatctgcgtcaatagtgatattttgaccgcttaaatcgctggcgtcgtaggaaatctcttccattaaacgctccagaacagtgtgtaaacgacgagcaccgatgttttcggtagattcgttcacctgccatgccgcttccgcgatgcgtttaataccggagtcggtaaactcgatatttacgccttcagtcgccatcagtgctttgtactgcacggtgatagaggcattcggctcggtcagaatacgctcgaagtcgctggtggtcagcgcctgcagttcaacgcggattggcagacgaccttgcagttccgggatcaggtcagacggtttcgcaatctggaacgcgccagaagcgataaacagaatgtggtcagttttgaccatcccgtgtttggtggaaacggtgcaaccttctaccagcggcagcaggtcacgctgaacgccttcacgagaaacatccggaccggaagactcgccgcgcttacagattttgtcgatttcgtcgataaacacgatcccgtgctgctcaacagcgtcgatagcgtcttgcttcagctcttccgggttcaccagtttcgccgcttcttcttcaatcagcagcttcatggcgtctttgattttcagcttacgcgctttttgcttctggccgcccaggttctggaacatggactgcagctggctggtcatctcttccatgcccggaggagccataatttcaacgcccatcggtgctgcggcaagatcgatctcgatttctttgtcatcaagctggccttcacgcagttttttgcggaatgcctgacgagcagcggacggttcctgctgctgttcggtctgtccccagttgtttttagcaggtgggatcagcacgtcgagaatacgttcttctgccagttcttcagcgcgataacggtttttctcgatagcctggacgcgtaccattttcacggcggcatcggtcagatcgcgaataatagaatccacttccttaccgacgtagcccacttcggtgaatttggtcgcttcaactttgatgaacggcgcattcgccagcttagccagacgacgggcgatttcagttttaccgacaccggtcgggccgatcatcaggatatttttcggggtcacttcatggcgcagctcttcgttgagctgcatgcgacgccagcggttacgcagagcaatcgccacagaacgcttggcgttgtcctggccgatgatgtgcttatccagttcgctgacgatttcgcgtggggtcatttcagacatgggagatccttacgctttgtagcttaattcttcgatggtgtggaaatggttggtatagatgcaaatgtcgcctgcaatatccaacgccttttcagcaatttcacgggcgctaagttcagtgttttctaacagcgcgcgcgccgcagcctgggcgtaagggccgccggagccgatagcaataagatcgttttctggctgcaccacgtcaccgttaccggtgatgataaggcttgcagtttcatccgcgactgccagcagtgcttcaagtttgcgcagcatgcgatcggtacgccagtcttttgccagctcaacggcggctttgaccagatggccctgatgcatttccagtttacgttcaaacagttcgaacagcgtaaaagcatccgcagtaccgcccgcaaagcccgcgatgactttgtcgttgtacagacggcggacctttttcacgttgcctttcattacggtattgcccaacgtggcctgaccatcaccagcgatgaccacatggccgttacggcgtacgcttactatagttgtcacgagctgaccccttggttacgaatacagagtacaaaccccgtacaaaagtacggggcataatgcaattatagatgggggggattttgagggtttcaacccccggcggcgagccgaatgcagtttgtatgacccgccatcttcaaccgattgagggtgctgtctgcgttctctttgcctttcaccgggccaatgaccacacgattccagccattgttggtggtgattttgctgtcaaagccttcgaacgccagctgagcacgtaccgtctctgcctgttccgcgcctctgaagctaccgcactgcaccatccagcggcgttcgtcttttttctccgccgtcggttttggcgcgtcagcggcacgagcaactggcgcagcttgctgcggcttgctctgcgcagtcgtgtgcgcaggagtttgcagcagatcctggtacggctgctgagaagaagccggtttagactggcgcggttgcgcctgtaccggtgcggcttggctcgtacgcgtctgctgctgccagctttgttcagtcgtacggctctgctgagccaggcgttgctgttccgctaattgctgcgcctgacgttggcgctgtagcgtttgctgacgctgttccggcgtctgttcattccacggaacttcaaccagctgcgttggctgctggcgcatatcagcctgcatttgttcaagaagctgacgttgttctggtgtcagttgctccggcgttttcacttcaccaccggcagaaggttctgtgggcgcacgcactcccggctggcgactttccagctctttaatgtagcgccagcgttcttctggttttggtggtagtccgtttccggtcactttctggctttgcagcgtctcggactcttctttcttgtgatgcgtaatgaagtacagaccaccgataaaggtcacaagaacggcggcagcaatagcgaccatagcgggagaaaccgcaggcagatttcgttgctttttccgactggtgctcttttttcgccggctaggtgccggttggctgcggcgtacataatctcgttgtgccactatcgtttcgctgtatttattcgttcgtcagcccgccatgttacttaagcggcgggcctttgaccagtcacggcagtcttaaaggtttactttaaggtaacgcgcgtgtacttccccggatgataagttcgcagtccattaaacgagagccactgccaacgtgttgcccctgcatttgatcaagcaataacagcatagcttcccgaccgatttcgtaacgcggctgcgcgatggttgtcagcggcggatcacaaaattgcgtcaggtcgatgttatcaaaaccgattatggaaaggtcttccgggactttcagcccctggcgttttgcctgagaaagtgcgccgagcgccatcacatcgctatggcagaagacagcagtaggcggttgtggaagatcaagcagctgctgcatcgctttgcttccggcttcgaaggtgaagtcgccacgggcgatgtattgcggatcaaccataatgccgcagcgacgcagcgcctgaacatagccttgcaggcggtagtgacacagcggcatctcttcgggaccggctatacagccaatccgtttatgcccttgctcatataaataatttactgcatcaaatgcggcggtcagattgtcgatatgaactgtaggcagctccagctccggtgcaaattcgttcgccatcaccatcggcggcagattacgctgttcctcaatgctggcatcaaacggcagcctactacccagcaacaacatgccatcaatttgcttggtgatgatcaaatcgataaaggttttttcctgctgattttgatgcgcacagtcgccaatcagcaccagatatccgtgatttgccgccgtaacttcgataccgcgaataatttcgctaaagaagggatcgcagatatccgggacaatcaccagaatggtgcgggattcattacgcttgacgttgcgccccataggctgcggtaaataacccacttcccgggccgctttttcaacccgattacgggtggcctgggagactttatcgggattcattaatgctcgggagacggtcgctgtagagacttttgccttgagggcaacgtctttcatggtcgcggcagtttcctgcttcttcgctttcacactcactcctcgcctggcacgtcaggcgtactacatccatgtttacttcacatcggcaacatttttagcagatagcgcgtgaaaacggttacagaattttcatgaaaagtgtgatgaatattgaatttttcgatccgcctcgcatcgtgagcggtttaaccctcaatcggatcaacatccagcacccatttcaccttacgggaatccggtattgtattgatgagcgccagcgtaccgttaatgatgtgttgcaagcgcacgcgggaagggtgctgcaacaatatctgccagcgccagcgaccgccacgtttaggtgccagagccggaaccggaccgagaacccacagtttctcgtctgccagtgggctggagaggatcagattacgcagttgttgcaggaacaatggcgcgtgctgattgttatgatcttccgcacgcacaatcacatggctggtccacggcggtagctgcatcattcgccgctcagccagcgcctgttcggcaaaggcgtcgtagcctttatagagcaacgtttgcaacagaggatgttccggatggtgcgtttgcagcaccacttcgccctgtttacccgcacgcccggcacgaccggcgacctgggtgtaaagctgagcgaaacgctctgcgctgcgaaaatcggcagaaaacagcgcgccgtccacgtccagtaatgcaaccagcgtcacatccgggaaatggtgacctttcgccagcatttgtgtaccaatcaaaatccgcgcgccgccgcgatgtacttctgccagttgctgttccagcgcccctttgcggctggtggtatcgcggtcgatacgagaaatgggcacgccggggaacaacggcgcgagcgtctgttcaagctgttcggtgcccagccccacggggaccaggtgcgtggaaccgcaggaagggcactggcgcggcaccggacgctgactgtcacagtggtggcagcgcagatggtgctgcgcctgatgcagcgtgtagtagtgatcgcaacgtgggcattcggcaatccagccacagtcgtggcacagcagtgcaggcgcaaagccacggcggttaagaaagagaatgacctggttatcagcctgtaaatgctggcgcatacgagtgattaacgccggagccagacctgcctgcaccttctgaccttttaaatccagcacatgttgaattgccggacgcgcattccctgcccgacgggtcaggcgcagcaggcggtattttttctgctggacgttgcataacgtttccagcgcgggcgttgcggagccaagaataatcgggatttgctcgctgtgcgcacgatacaccgccaggtcgcgggcatgatagcgccagccttcctgctgcttgtaggagctgtcgtgctcttcatcaatgacaatcacgccgagatttttaaacggcgtaaacagcgcggagcgggtgccgatcacaatcgccgcctcaccatttttcgctttcagccacgcgctaagacgctcgctgtcgttcaggccggaatgcagaacttccacgggggcattaaaacgttcacgaaaacgggcgatagtttgcggtgtcaggccgatttccggcaccatcaccagcgcctgtttgccctgagcgagcacgttttccagtacgctgagataaacctccgttttaccggaaccggtaacgcccgccagcagccaggcagaaaaagtatctgccgcgctatgaattgcgccaacggcggtggcctgttcggtattcaatcgcaaccgctcaccagaaacggcatagttcgttcgccagtcgctaaactctggtgtttcacttgctaaatcacacagaccttttttgcgtagcgcctgcaacgcggcatcattaaattcgagcgtggcgacctggtcgcgccagattttgccttgccgtaacgccgccagcgcctgttgttgcttgggggagcgtttcaggctgttcagatccaccgcctggccttgttcagtggcaaaccagtaccacatcggcgcgttcgccgcaggccgcccctggcgtagtaaaatcggcaaggcatgaaacagcacatcgccaatcggatgatgatagtaatctgccgcccatagcagcaatcgccagacggagtgagtaaacaccggctcactatccagcacttcgactaccgcttttagctcattgagcggcagttcgctggcatcgctaacacttaccacaatcccgatgcgctcctgctgtttgccaaacggcacgcgcacgcgacacccagctttaaccgtcatgccttctggcagcagatagtcaaaggtacgaggaagcggaacgggcaaggcaacgtgggcaacgggcatagcatcatcctgacttgaaattcggtgggttagtatacacattgccgtagaagagtgcggatcagtttgcatacgctggttaatttctgtatgatttcgcgccttcgtacgaaatgatcgtattgaagctatacttttaacatcgcgtggtgtctggcgttagggctggaagagcgacgcggccttaaaccgaggttttcccatgaaaaaagatattcacccgaaatacgaagaaattactgctagctgctcttgcggtaacgtaatgaaaatccgctccaccgttggtcatgacctgaacctcgacgtgtgcagcaagtgccacccgttcttcactggcaaacagcgtgatgttgctaccggtggccgtgttgaccgcttcaacaagcgtttcaacatcccgggcagcaaataagaccggatttccgaaaaaagcgccgcacggcgctttttttgtgcctgaattttggtcgtattaccagctaaacagcggccattctttggcgaccgtggtgagttgtggcgcatcgaaaacggcttgtgggctgaccaccgtttcctcaagcggaatattcttgccgtaacgttctttgagctttgcctgaacttgtgggctgctcaggtcgaactctttcaacttctgctgctcgcccacgcgcattcccagcgcgttctggtaaaccttccacaccacttcgctacagtactggcgatcgtcgctccaactgaagctgaaatcatacggtttaccgagataacgttttgccgtttgcgccagtttttgctgttgttcaacactcagtccgccttcaacgcggcgaacaacgtatttgcccttttcaccatgggcgatccactgcttgagcggggtgtatttcaccgggccgactgcttcaaaaacgtagggctttttgttgcgtatcaccagcataccggtgtggctataatcggtatgggtcgccagttggatcgctttactttggctactgcgagagatctgaaagatgatgtcgccggtttgtggctgccaggcaaaggcaggtacagaaaccagcaggctgaggatcagcagcctgtttttcatagttaaacgtccatgtataaaaagcggtgggtcgcagacaacgtgctcgttgtttatgccggatgcggcgtgaacgccttatccggcctacaagttcgtgcaaattcaataaattgcaatatgacgtaggcctgataagcgtagcgcatcaggcgattccactccgcgccgctcttttttgctttagtattcccacgtctccgggttaatccccatctcacgcatgatctcttttgccgcttccgggatttcgtcgctgcgctctttacgcagatcggcatcatccggcaaaggttgcccggtaaaggcatgcagaaacgcttcgcacagcagctcgctgttggtagcgtgacgcaggttgttcacctgacgacgcgtgcgttcatcggtgaggatttttaacaccttaagaggaatggaaaccgtaatctttttgacttgttcactcttcttgccgtgctcagcgtatgggctgatatattcgccgctccattcagccatgagatacttaatcctcttcgtcaataaattgagaccagaccacacagttgatgtgggtactgaccgtaaacccgcatagtttaccgtacaggcgttaccgtgacatcgtgtaatgcacctgtcggcgtgataatgcatataattttaacggctatttgggatttgctcaatctatacgcaaagaagtttagatgtccagatgtattgacgtccattaacacaatgtttactctggtgcctgacatttcaccgacaaagcccagggaacttcatcacatgacgcgtaaacaggccaccatcgcagtgcgtagcgggttaaatgacgacgaacagtatggttgcgttgtcccaccgatccatctttccagcacctataactttaccggatttaatgaaccgcgcgcgcatgattacagccgtcgcggcaacccaacgcgcgatgtggttcagcgtgcgctggcagaactggaaggtggtgctggtgcagtacttactaataccggcatgtccgcgattcacctggtaacgaccgtctttttgaaacctggcgatctgctggttgcgccgcacgactgctacggcggtagctatcgcctgttcgacagtctggcgaaacgcggttgctatcgcgtgttgtttgttgatcaaggcgatgaacaggcattacgggcagcgctggcagaaaaacccaaactggtactggtagaaagcccaagtaatccattgttacgcgtcgtggatattgcgaaaatctgccatctggcaagggaagtcggggcggtgagcgtggtggataacaccttcttaagcccggcattacaaaatccgctggcattaggtgccgatctggtgttgcatagttgcacgaaatatctgaacggtcacagtgacgtagtggccggcgtggtgattgctaaagacccggacgttgtcactgaactggcctggtgggcaaacaatattggcgtgacgggcggcgcgtttgacagctatctgctgctacgtgggttgcgaacgctggtgccgcgtatggagctggcgcagcgcaacgcgcaggcgattgtgaaatacctgcaaacccagccgttggtgaaaaaactgtatcacccgagcttgccggaaaatcaggggcatgaaattgccgcgcgccagcaaaaaggctttggcgcaatgttgagttttgaactggatggcgatgagcagacgctgcgtcgtttcctgggcgggctgagcttgtttacgctggcggaaagtttagggggagtggaaagtttaatctctcacgccgcaaccatgacacatgcaggcatggcaccagaagcgcgtgctgccgccgggatctccgagacgctgctgcgtatctccaccggtattgaagatggcgaagatttaattgccgacctggaaaatggcttccgggctgcaaacaaggggtaaaaatgagtgtgattgcgcaggcaggggcgaaaggtcgtcagctgcataaatttggtggcagtagtctggctgatgtgaagtgttatttgcgtgtcgcgggcattatggcggagtactctcagcctgacgatatgatggtggtttccgccgccggtagcaccactaaccagttgattaactggttgaaactaagccagaccgatcgtctctctgcgcatcaggttcaacaaacgctgcgtcgctatcagtgcgatctgattagcggtctgctacccgctgaagaagccgatagcctcattagcgcttttgtcagcgaccttgagcgcctggcggcgctgctcgacagcggtattaacgacgcagtgtatgcggaagtggtgggccacggggaagtatggagcgcacgtctgatgtctgcggtacttaatcaacaagggctgccagcggcctggcttgatgcccgcgagtttttacgcgctgaacgcgccgcacaaccgcaggttgatgaagggctttcttacccgttgctgcaatagctgctggtgcaacatccgggcaaacgtctggtggtgaccggatttatcagccgcaacaacgccggtgaaacggtgctgctggggcgtaacggttccgactattccgcgacacaaatcggtgcgctggcgggtgtttctcgcgtaaccatctggagcgacgtcgccggggtatacagtgccgacccgcgtaaagtgaaagatgcctgcctgctgccgttgctgcgtctggatgaggccagcgaactggcgcgcctggcggctcccgttcttcacgcccgtactttacagccggtttctggcagcgaaatcgacctgcaactgcgctgtagctacacgccggatcaaggttccacacgcattgaacgcgtgctggcctccggtactggtgcgcgtattgtcaccagccacgatgatgtctgtttgattgagtttcaggtgcccgccagtcaggatttcaaactggcgcataaagagatcgaccaaatcctgaaacgcgcgcaggtacgcccgctggcggttggcgtacataacgatcgccagttgctgcaattttgctacaccagtgaagtggccgacagtgcgctgaaaaacctcgacgaagcgggattacctggcgaactgcgcctgcgtcaggggctggcgctggtggcgatggtcggtgcaggcgtcacccgtaacccgctgcattgccaccgcttctggcagcaactgaaaggccagccggtcgaatttacctggcagtccgatgacggcatcagcctggtggcagtactgcgcaccggcccgaccgaaagcctgattcaggggctgcatcagtccgtcttccgcgcagaaaaacgcatcggcctggtattgttcggtaagggcaatatcggttcccgttggctggaactgttcgcccgtgagcagagcacgcttagcgcacgtaccggctttgagtttgtgctggcaggtgtggtggacagccgccgcagcctgttgagctatgacgggctggacgccagccgcgcgttagccttcttcaacgatgaagcggttgagcaggatgaagagagcttgttcctgtggatgcgcgcccatccgtatgatgatttagtggtgctggacgttaccgccagccagcagcttgctgatcagtatcttgatttcgccagccacggtttccacgttatcagcgccaacaaactggcgggagccagcgacagcaataaatatcgccagatccacgacgccttcgaaaaaaccgggcgtcactggctgtacaatgccaccgtcggtgcgggcttgccgatcaaccacaccgtgcgcgatctgatcgacagcggcgatactattttgagcatcagcgggatcttctccggcacgctctcctggctgttcctgcaattcgacggtagcgtgccgtttaccgagctggtggatcaggcgtggcagcagggcttaaccgaacctgacccgcgtgacgatctctctggcaaagacgtgatgcgcaagctggtgattctggcgcgtgaagcaggttacaacatcgaaccggatcaggtacgtgtggaaagcctggtgcctgctcattgcgaaggcggcagcatcgaccatttctttgaaaatggcgatgaactgaacgagcagatggtgcaacggctggaagcggcccgcgaaatggggctggtgctgcgctacgtggcgcgtttcgatgccaacggtaaagcgcgtgtaggcgtggaagcggtgcgtgaagatcatccgttggcaagtctgctgccgtgcgataacgtctttgccatcgaaagccgctggtatcgcgataaccctctggtgatccgcggacctggcgctgggcgcgacgtcaccgccggggcgattcagagcgatatcaaccggctggcacagttgttgtaatttcagaaatttaataatgcccggtactcatgttttcgggtttatggtttctaatgaaatatattgaattatcataggattaggccggattaagcgtttacgacgaatccggcaagaagcaataagtacatggttagtttatatttgcagtccggtttgctttgcataccggattttctttttcttaccatcctgaagttttttcatcttccctgatttttcctcaccatcattggtcatttttcggttgacgcccttcggcttttccttcatctttacatctggacgtctaaacggatagatgtgcacaacacaacatataactacaagcgattgatgaggtaaggtatgagcttttttcacgccagccagcgggatgccctgaatcagagcctggcagaagtccaggggcagattaacgttagcttcgagtttttcccgccgcgtaccagtgaaatggagcagaccctgtggaactccatcgatcgccttagcagcctgaaaccgaagtttgtaagcgtgacctatggcgcgaactccggcgagcgcgaccgtacgcacagcattattaaaggcattaaagatcgcactggtctggaagcggcaccgcatcttacttgcattgatgcgacgcccgacgagctgcgcaccattgcacgcgactactggaataacggtattcgtcatatcgtggcgctgcgtggcgatctgccgccgggaagtggtaagccagaaatgtatgcttctgacctggtgacgctgttaaaagaagtggcagatttcgatatctccgtggcggcgtatccggaagttcacccggaagcaaaaagcgctcaggcggatttgcttaatctgaaacgcaaagtggatgccggagccaaccgcgcgattactcagttcttcttcgatgtcgaaagctacctgcgttttcgtgaccgctgtgtaagcgcgggcattgatgtggaaattattccgggaattttgccggtatctaactttaaacaggcgaagaaatttgccgatatgaccaacgtgcgtattccggcgtggatggcgcaaatgttcgacggtctggatgatgatgccgaaacccgcaaactggttggcgcgaatattgccatggatatggtgaagattttaagccgtgaaggagtgaaagatttccacttctatacgcttaaccgtgctgaaatgagttacgcgatttgccatacgctgggggttcgacctggtttataaatagtgtggcttttgtgaaaatcacacagtgatcacaaattttaaacagagcacaaaatgctgcctcgaaatgagggcgggaaaataaggttatcagccttgttttctccctcattacttgaaggatatgaagctaaaacccttttttataaagcatttgtccgaattcggacataatcaaaaaagcttaattaagatcaatttgatctacatctctttaaccaacaatatgtaagatctcaactatcgcatccgtggattaattcaattataacttctctctaacgctgtgtatcgtaacggtaacactgtagaggggagcacattgatgagcacgagtgacgatatccataacaccacagccactggcaaatgcccgttccatcagggcggtcacgaccagagtgcgggggcgggcacaaccactcgcgactggtggccaaatcaacttcgtgttgacctgttaaaccaacattctaatcgttctaacccactgggtgaggactttgactaccgcaaagaattcagcaaattagattactacggcctgaaaaaagatctgaaagccctgttgacagaatctcaaccgtggtggccagccgactggggcagttacgccggtctgtttattcgtatggcctggcacggcgcggggacttaccgtagtatcgatggacgcggtggcgcgggtcgtggtcagcaacgttttgcaccgctgaactcctggccggataacgtaagcctcgataaagcgcgtcgcctgttgtggccaatcaaacagaaatatggtcagaaaatctcctgggccgacctgtttatcctcgcgggtaacgtggcgctagaaaactccggcttccgtaccttcggttttggtgccggtcgtgaagacgtctgggaaccggatctggatgttaactggggtgatgaaaaagcctggctgactcaccgtcatccggaagcgctggcgaaagcaccgctgggtgcaaccgagatgggtctgatttacgttaacccggaaggcccggatcacagcggcgaaccgctttctgcggcagcagctatccgcgcgaccttcggcaacatgggcatgaacgacgaagaaaccgtggcgctgattgcgggtggtcatacgctgggtaaaacccacggtgccggtccgacaagtaatgtaggtcctgatccagaagctgcaccgattgaagaacaaggtttaggttgggcgagcacttacggcagcggcgttggcgcagatgccattacctctggtctggaagtagtctggacccagacgccgacccagtggagcaactatttcttcgagaacctgttcaagtatgagtgggtacagacccgcagcccggctggcgcaatccagttcgaagcggtagacgcaccggaaattatcccggatccgtttgatccgagcaagaaacgtaaaccgacaatgctggtgaccgacctgacgctgcgttttgatcctgagttcgagaagatctctcgtcgtttcctcaacgatccgcaggcgttcaacgaagcctttgcccgtgcctggttcaaactgacgcacagggatatggggccgaaatctcgctacatcgggccggaagtgccgaaagaagatctgatctggcaagatccgctgccgcagccgatctacaacccgaccgagcaggacattatcgatctgaaattcgcgattgcggattctggtctgtctgttagtgagctggtaagcgtggcctgggcatctgcttctaccttccgtggtggcgacaaacgcggtggtgccaacggtgcgcgtctggcattaatgccgcagcgcgactgggatgtgaacgccgcagccgttcgtgctctgcctgttctggagaaaatccagaaagagtctggtaaagccagcctggcggatatcatagtgctggctggtgtggttggtgttgagaaagccgcaagcgccgcaggtttgagcattcatgtaccgtttgcgccgggtcgcgttgatgcgcgtcaggatcagactgacattgagatgtttgagctgctggagccaattgctgacggtttccgtaactatcgcgctcgtctggacgtttccaccaccgagagtctgctgatcgacaaagcacagcaactgacgctgaccgcgccggaaatgactgcgctggtgggcggcatgcgtgtactgggtgccaacttcgatggcagcaaaaacggcgtcttcactgaccgcgttggcgtattgagcaatgacttcttcgtgaacttgctggatatgcgttacgagtggaaagcgaccgacgaaagcaaagagctgttcgaaggccgtgaccgtgaaaccggcgaagtgaaatttacggccagccgtgcggatctggtgtttggttctaactccgtcctgcgtgcggtggcggaagtttacgccagtagcgatgcccacgagaagtttgttaaagacttcgtggcggcatgggtgaaagtgatgaacctcgaccgtttcgacctgctgtaatctgaccccgttcagcggctgcttgctggcagtcgctgaacgttctttaccagcgtatagtgggcgaacgaaaactacacactggatctctcatgtctgccgcaggaaagagcaacccactggcaatcagtggcctggttgtgctcacacttatctggagttatagctggattttcatgaagcaagtcaccagttacatcggtgccttcgactttaccgccttacgctgcattttcggcgctctcgttttattcatcgtccttttattacgtggtcgcggaatgcgcccgacaccgtttaaatacaccttagccattgccctgttacaaacctgcgggatggttggtctggcgcagtgggcgttggtcagcggaggtgcggggaaggtggcgatcctgagctataccatgccgttctgggtggtgattttcgccgcgttgtttctcggtgaacgcctgcgacgtgggcaatatttcgcgattctgattgccgctttcggcttatttttggtgttgcagccgtggcaactcgatttctctagcatgaaaagtgccatgctggcaatcctctccggcgtcagttggggggcgagcgcgattgttgctaaacgtctgtatgcccgtcatccgcgcgtggatttattgagcttaacatcctggcagatgctgtatgcggcgctggtgatgagtgtggtcgctttactggtgccgcaacgtgaaattgactggcagcccaccgtgttctgggcgctggcctacagtgcgattctggcgacggcactggcgtggagcttatggttgtttgtattgaaaaacttgcctgccagtattgccagcttaagcacactggccgttcccgtttgcggcgtactcttttcctggtggctgctcggcgagaatccgggggccgttgaaggtagcggtattgtgctgattgtgctggcactggcgctggtgagccgtaagaaaaaagaagccgtcagtgtaaaaaggatctgaattttttcttcatgtggggcgatctcttatttaacaaaataacgataatgccccaccatccgccagttaaacagcacatcttcttcctgcgcgcctgcgccaatgttatgtatcaccagcggcgtaccgtcgcgggcgaagccatcactaaccaccccaatatgtgccagcccgttatccagtcgccaggagacaatatcgcccgcttgatagtcactggggttcttgctggtggggcgtgttttatcatggcggctaaaccaggtttccagattaggcacccgacggtgatcgatgttgctgtccgggcgctttaacttccatttttgcgggtactcagcaaaattcttcgccatatcttcgtgaaccagtttctgcaaatcgaccttctggctgcgcaatgcgcggatcaccacatcggaacatacaccgcgttcttgcggaacatcaccgccaggataagtaagctgcacatacgccggatcgtaaaatagcgtgctgccaatttgctgtctggcaccgtctgcgatggcaaggttggtattggcctggatttgtaccacggttggtggaacggcgggagattttaaggagtggctggtaaatgccgttagcaggctgagcagcgccagactagctttcatctggttcgtccgtgaaaataagagtcacagattcgaccttccgggctaacgattgttctgtagagaaaatgtccagaagcggataaaaaattcctgaacaacgtgggagtttcagattactggcacagagtgccggatgcggagtgaacgccttatccggcctacaaaagcacgcaaattcaatatattgcagagattgcgtaggcctgataagcgtagcgcatcaggcaattttgcgttcaaactcccggacaagccgggagtttggagtaggttattcccactcttgcaggaaacgctgaccgtactggtcggctaccagcagagcggcgtaaacctgatctggcgtcgcgccgccaggcatgttgtgaatggtttcaccttctgcacatgccgcttctgccacaattcgcattttcgccgggacatcttctttaatatccagttgagcgagagttattggcaaacctaccgcatggctaagggcagctacggtttcgatttcctccaccggcgcattttccagaaccagctgcgtcagcgtaccgaatgccactttttcaccgtgataatagtgatgcgcgtccgggatagcggtcaggccgttatgcactgcgtgcgccgcagccagaccaccactttcaaaaccaacaccgctcaaataggtgttcgcttcaatcacgcgctccagcgccggagtcactacatgctgttcggcagcaagcatcgctttttcgccttcttccagcagggtgttgtagcacagttcagccagtgccagcgcagcctgggtgcacttgccgcccgccatggtggtcgcgccgctacgagagcaggcacgcgcttcaaaccaggttgccagcgcatcgccgatacccgccgctaacagacgtgcaggtgcgccagcgacgattttggtgtcgacaatgaccatattcgggttatttggcaacagcagatagcggtcaaactcaccctcatcggtgtagataacagacaatgcgctgcacggtgcatcggtagaggcgatagtcggtgcgatcgctaccggaacacccatgaaatgtgccagtgctttggcagtatcgagggtttttccgccaccgataccgagaattgcgccacactgcgcagtctccgcgatgccacgcagacggtcgatctcattttggctacattcaccgccaaacggcgcaatttctactaccagtccagcatctttaaagcttttctcgacagtggattgagcaaaacctaaaacaaatttgtcacccaccactaaccagcgttctgccagcggcttcaggtattcgcccagacgattaatcacatcagcgccctggatgtatttacccggactttgaataatgcggtccataattgctcctttagagatgagtagtgccaaatgcggcattccagtcgtgttcgaacttctctatagcactctctaccgcaggggtgttgagcatttgttgcgctacatctaagggcagggtgatggattcacatcctgccagtaaacagtccagcgcctgacgcggcgttttaaagctggctgccagcaccatgctttctggcgcgtgcatttctaacagcgtttgcagctcctgaaccgtacgaatgccgtctccgccctgggcatctacgcggttaacatacggagcaacgtattttgcccctgccagtgcggctaataacccttgtgcggcgctatatacagcagtgccaagtgtagtaataccctcttttttcagtattttaattgctgccagaccttcggaagtcaccgggattttcaccacaatacccggaatagcgtcgcgcaggcgcttcgcttcttccaccatcccctgcgcgtcgcggctcatggtctgagcaaacagaatgccctcatcaccaatcgctttttgcagacgcggcagcacttcccatatggactccttgctggcagcgataatgctcgggttagttgtcaccccggcaatggggaatatgcgtgccagacgttcgacttctgcgacgttagcggtgtccagatacagttccatgatgtttccttttacagttccagttcatgttgcagcaggctggcgatagcgtcggcagaggcggcgttaaccagcgcgttacggaattcttcgtgcatgatgcggcgagcgaggcggctgaaaatgcgcatatgctgatcgcccgcagcgtgtttgttcagggttaacataatgatgaattgcgcttcatcatcgccccagcgcaccggcgcttgcagacgcgccacgctgatggtggattgctcaatgtgttcacttttgctgtgtggaatggcaaaactaaagcccagaccggtagagaaaacggcctcgcgcgcccacaagtcggcttccagtttacgcggatagcggcagcggcccgccagcagcaggttatcggtcatgcctttgagcacttcttctttgctgcgccagtcgctttccagtgtgatgcactcggcggtgaccagcggtgcgtcttgttgggtcatgcggaattgcgccagcaggtgttctacttccaggctagtacggcaggccattgcctggttgagcaacttgcggcactcacggctatcaagttgcgccatccgagctttcgccgccggaatacttggtgcgctcatgctgagttcatccagccctaagccgaccagcaacggcagcacggaacctttcgctcccagctcaccgcacagaccaatccatttgccctggcgatgcaccgcttgcacggcgtaatcgagcgcccgcaagaatgccggattcaggctgttgtagtgacgagtaaccttagcgttatcgcgatccaccgccagcagatactgcgtcaggtcattactaccaatactaaagaaatcaatctcttcgcagcattgatcgatgatgaacatcacgctcggcacttccagcatgatgccgagctggattttctcatcaaacggaatgtgttcgttacgtagttgctgtttggcttccgccagtttttctttcacccataagatctcttccatactggagatcatcgggatcatgattttcaggctgccgtgagcggaggcgcggaggatgctccgtagctgcgtggtaaacaagctcgcgtactcttcataaatacgcacggcgcgataaccgaggaacgggtttgcctctgcgggaatgttcagataatcaacgggtttgtcgccgccaatgtccatagtgcgcacaataatgctgcgtccgttggcggattccagcgcctgacaaaaaatgttgtacaactcgctttcgcccggtgcgctggtgcgatccatatagagcatttcagtgcggaacaaaccaacgccttccgcaccattgccgaatgcggcctgcgcttccacggagtgagcgatgttagcggcaatttcaatgcggataccgtcagcggtacgggcttgttgggtcagccagacacgctgttgctcacgcagggcgtcctgtacgcgggcttcttgctgataataacgagctacggcttcccctggctcaaccacaatcgccccggcgttgccgtcgatataaatcgtttgttgctgccacggagtaagggcatcaatatccacaccaaccagcgttggaatgttgaagctacgggcaaggatcaccgtatgactggtggtgccgccgcttttgagcaacaatcctttgaggtgatttttatccagttcgaggaactggctgggggtcagttcatcagccatacaaatggcgggctgcgtcagtttgcccggtgccgggaagcgttgctcaccgtagatttgctggagtaactggaagcagacgtcgcgtacgtccagggcacgttcttgcaggtagctgctgctggaacgggaaaactcttcgcaaaagtgattcgcgctggcaacaattgcttcggcgcagcttaatccggcgctgacgcctgccagtaaatgttcgcgcagggaagtatcgccagccagggatcggtgagcttccagaatcgcgctggtagcaccgtcgctatccagcagacgaaactcaatgtttttcagtaccagcgtcaggccgttttccagtgcggattgctcggcgtcaacgcctttggctgcgggaagattacccagcgcattgagatctaaagaagagatcggcgtcagaatgccgcctgcactaccgctgcacacggtgcgggcgcggataatttgcggattcagattggtcagactaaccggcagtggttccagttcgtcagatttaacttccgccagcggcgcatcgcagtgggggaattcatcgcgcagccattggcttaaacgctggtgcgcttcctgttcgtcggccccggaaatcagtaactggcagttatcgcccgccagcgtatcggtgccaatcagcgcaagggcgcttttggcgttgcccttgcggtcagtgcgcaggttatgccactcaatttgactactaaaagtattacacagcgtttcaacgtggcttgccggacgcgcatgtacgccgttaggtagctcacaaataaattccacaatcagggccattgcctctctcccggtacggttttctgtttacaggataagagcgcacggcaacggcctgccatgtgacaaatctgccaaaagctggacaaatgtaatgtaaccgtcaatttgcgacgcgtctcacaagacgctgttttgcggcatgcttccggtttatcgcaagttatgaggcggatcgcatttttgtactgatattacaaaagtccagtaaatggcctttttatccactgtttgctccgcctgcgattgcctattgtttcctccatcaaaaatatggacatgggctttcgcaagcccgggagcagcttatgaatgagttggtgcagatcctgaaaaatacccgtcagcatttaatgacgggcgttagtcacatgattcccttcgtggtaagcggcggtattttgctggcggtttccgtcatgttgtatggcaaaggcgcagtgccggatgccgtagccgatccaaatctgaaaaaactgtttgatatcggcgttgcgggcttgacgctgatggtgcctttcctcgcagcgtacatcggttattccattgcagagcgttctgcgctggctccgtgcgctatcggtgcctgggttggtaacagctttggtgcgggcttctttggtgcactgatcgccgggattatcggcggcatcgtggtgcattacctgaagaaaattccggtgcataaagttctgcgcagcgtgatgcctatcttcattattcctatcgtcggcacactgattaccgcaggcatcatgatgtggggcttgggcgagcctgtaggggcgttgaccaacagcctgactcagtggcttcaggggatgcagcagggcagcattgttatgctggcggtgatcatgggtctgatgctggcgttcgatatgggcggtccggttaacaaagtggcctatgccttcatgctgatttgcgttgctcagggtgtttataccgtggtggccatcgctgccgtgggtatttgtatcccgccgctggggatggggctggcgacgctgattggtcgtaaaaatttctccgcagaagagcgcgaaaccggcaaagcggcactggtgatgggctgtgttggcgttactgaaggggcgattcctttcgccgctgccgatccgctgcgtgtcattccttccatcatggtcggtagtgtttgtggtgcagtaactgcggcgctggtcggtgcgcagtgctatgcaggctggggtggtctgattgtgctgccggtggttgaaggcaagctgggttatatcgcagcagtggctgtcggagcagtggtgacggctgtttgtgtgaacgtgctgaaaagtctggcgcgtaaaaatgggtctagcactgatgaaaaagaagacgacctggatttggattttgaaattaattaattgaggaacgagccatgacgaaaattattgcagtaaccgcatgtcctagtggtgttgcccatacctatatggcagcagaggcgctggaaagtgccgcgaaagcgaaaggctgggaagtgaaagtagaaacccaggggagtattggtctggaaaatgaactgactgcggaagatgtggcgagcgctgatatggtgattctgaccaaagatatcggcatcaagtttgaagagcgttttgctggcaagaccatcgtgcgcgtcaacatcagcgatgcagtaaaacgtgctgacgccattatgagcaaaattgaagctcacctggcgcaaaccgcttaagttcttctcccgctcgcaagggcgggttcgctttcccacaggagttcctcatgacgaatcgtatctctcgcctcaaaactgcactgtttgccaatacccgtgaaatcagcctggagcgggcgctgctttataccgccagccatcggcaaaccgaaggcgaaccggtgatattgcgccgggcgaaagcaacagcgtatatccttgaacatgttgaaattagcattcgtgatgaagaactgattgccggtaaccgcaccgtaaaaccgcgcgccgggattatgagcccggaaatggacccttactggctgctgaaagagctggatcaattcccgacgcgtccgcaggaccgctttgctatcagcgaagaagataaacgtatctaccgtgaagagttgttcccgtactgggaaaaacgtagcatgaaagatttcatcaacgggcagatgacagatgaagtaaaagccgcgaccaacacgcagattttcagcatcaaccagacggataaaggccaggggcacattattattgattacccacgcctgttgaatcacgggctgggtgagctggtggcacagatgcagcaacattgtcagcaacagccggagaatcacttttatcaggccgcgttgttactgctggaagccagccagaaacacattttgcgttacgccgaactggcggaaacgatggcggcaaactgcacagatgcccagcgtcgcgaagagctgctgactattgcagagatctcccgccataacgcgcaacataagccgcagacgttctggcaggcgtgccagttattctggtacatgaacatcattctgcaatacgaatccaacgccagtagcctaagcttggggcgcttcgaccagtatatgttgccgttctatcagacaagtttaacccagggcgaagatgcggcgttcctgaaagaactgctcgaatctttatgggtgaaatgcaacgacatcgtgctgttgcgctccaccagtagcgcgcgttatttcgccggtttcccgaccggctataccgcactgctcggcgggttaaccgagaacggacgtagcgcggtgaacgtgcttagcttcctttgccttgacgcctatcaaagcgtgcaattaccgcaaccgaacctcggcgtgcgcactaacgccttgatcgacacgccgttcctgatgaaaaccgccgaaaccattcgcttcggtaccggtattccgcaaatctttaacgatgaagtggtggtgccagcgttcctcaaccgtggcgttagcctggaagatgcgcgcgactattccgtagtgggctgtgtggaattatctattcccggcagaacctacggcttgcatgacatcgcgatgtttaatctgctgaaagtgatggaaatctgcctgcatgaaaatgaaggcaatgctgcgctgacttatgaaggtttactggagcagatccgcgccaagatcagccactacatcaccctgatggttgagggcagcaatatttgtgatatcggccatcgcgactgggcacctgtaccgctgctcagtagctttatcagcgattgtctggaaaaaggccgcgatattaccgatggcggcgcgcgttataacttctccggcgtacaggggatcggtatcgccaacctgagcgattctctccatgcgttgaaagggatggtttttgagcaacagcgtttaagttttgacgaattgctgagcgtattaaaagccaacttcgcaacgccagaaggcgaaaaagtccgcgctcgcttaattaaccgcttcgagaaatacggtaacgatatcgacgaggtggataacatcagcgccgaactgttgcgccactactgcaaagaagtggaaaaataccagaacccgcgcggcggctacttcacgccgggaagctataccgtttctgctcacgtcccgttgggaagcgtggttggcgcgacgccagacggtcgttttgccggagaacagctggcagacggcggcttgagtcccatgctgggccaggacgcacaagggccaacagcggtactgaagagtgtcagtaagctcgataacacgctgctgtctaacggtacgttgctgaacgtgaaattcactccggcgaccctggaaggtgaagcaggattacgcaaactggccgacttcttacgggcgtttacccagcttaagttacaacatattcagtttaacgtggtgaacgccgacacgttgcgggaagcgcaacagcgcccacaagattatgccgggctggtggtgcgcgttgccggatacagcgccttctttgtcgaactgagcaaggagatccaggatgacatcatccgccggacagcgcatcagctgtaattaaactgtcgaaggagatccaggatgacaagttccgccggacagcgcatcagctgtaacgttgtggaaacgcgccgcgatgatgtggcgcgcattttcaacattcagcgttatagtctgaatgacggcgagggcattcgtacggtggtcttttttaaaggctgtccgcatctttgcccgtggtgtgctaatccggagagcatctccggcaaaatccagacggtacgcagagaggcgaaatgtctgcactgtgcgaaatgtttgcgtgatgcggatgaatgcccctccggggcgtttgaacggattggtcgcgatatcagccttgacgctctggaacgggaagtgatgaaagatgacattttctttcgcacgtccggcggcggcgtcacgctttctggcggcgaagtgttaatgcaggcggagtttgctacccgttttttacagcgactgcggctgtggggtgtgagttgcgccattgaaactgccggagacgcaccagccagcaagctattaccgctggcgaaattgtgcgatgaagtgttgttcgatttaaaaattatggacgcgactcaggcgcgggatgtggtgaagatgaacctgccacgcgtgctggagaatctgcgtttgctggtgagtgagggcgtcaacgtgatcccgcgtttaccgctgatccctggtttcacgctcagccgggagaatatgcagcaggcgctggatgtactgatcccgctgaatatcaggcagatccatctgttaccgtttcatcagtacggcgaaccgaaataccgcctgctggggaaaacatggagcatgaaagaggtgcctgcgccgagcagtgctgatgtggcaacgatgcgcgaaatggcagaacgggccggacttcaggttaccgtgggaggttaaaatggcatacctggtggcagtaaccgcctgcgtaagcggcgtggcgcatacttatatggcggcggaacggctggaaaagttgtgcctgttagagaagtggggagtcagcattgaaactcagggcgcgctgggaacggagaatcgtttagcggatgaggatatccgccgggcggatgttgctctgttgattacggatatcgagcttgccggtgccgagcgatttgaacattgccgctatgtgcaatgcagcatctacgcattcctgcgtgagccgcagcgggtaatgagcgcggtgcgcaaagtgctttctgcgccgcagcaaacccatcttattctggagtaattattctggagtagtcggtttttctgtcagttggctgtggtactgccggcgatattcgctcgggctgcgttcggtgtttttacgaaacagacggcagaagtagttgctgtcgacaaagccgcaggcgtgcgccacttcttttaccttcaggtcatagcctttcaataacgtcttagcgtgctccagtcgcgtgtgattcaggtattcgttaaaaccaatggcccccgttttttgaaacaggtggctgaggtaatttgggctaatataaaacgcctgtgcaacagattcgcgggtaagcgcggaggcatagcgttcgtcgatataatcgcgaatagcttcaaatagtgcctggctgcgactggcggtctggatttggctgccaagcaaatcgcggcagtggctaagcaggctggcgacgataagccttgccgtttgctgctcctgcggctgcatttgcatttcattgagcgtttgtagcagaaaagaacctatgcgtgggccgcgtcgggcgacgtgttgcttcgccagattttgatattgtttgccatcccattgcacgacgctgaagccgagttgctgtttgccaaacagcacgctaaaggtagtagcgggggcttgccattgtggaaaattccagccaccagcaggaacgtacagcacatcgccgggaactaacgttgctccagcgccggtatcaacaaactcaccttccagcacaatttccagccgtggaaaatcgacctgatacgcaagatcgggcaccgggccgttactgctggcaaagtaaatctggcgcagggacagcgggccgttgatcaggcgggagagcagatagctgacgtcgtgatacatgttattcccttaggtatgtagacgggaaaacagtaactggcattattaaaaaaggccacctgaaaagtgtggcctgaggggagttcgatgtaaacattgcggcagttgtattgccggatgtggcgtaaacgccttatccagcctaccgccgcgatctgtaggccggataagacgcgtcaagcgtcgcatccggcaaatagcgcctggctgataattactgattacccacctgatcgccatagggcagtgtgtcgtaatcgatcagtgcgtttttcttatacgggttaccaatccagcgggtagtttctttgaactgcggattcaccacactacgggttggatcgtaaccgtcgtaagataagcccgccaaatcactccaggtgtggatcagttccgccaggctgtatttacgatcaacatcctggctgaaatcacggggatgagtcgcttgccatttttcactcgtccacagcaggaacggaatggtgtacatatgacgcgtcgggttgtcctcattacgcccctgagttttgtgcggcggcgtgtcgtaaacctcttcaccgtggtcagagaaataaaccaggaaaccgttcgggtttgctgctttaaagtctttaatcaggctggcaaccacatgatcgttatacaggttagcgttgtcataatcgttataactctccagctcttccgcgtttaatcccggcggaacatgatcggtattgccatcaaacttgccctgattttccgggtagcggtatttgtatttgatatgcgtacccagcagatgaacaatgatcagtttcttcggcgcagggtcattcagcacttcctggaacggcttcagcacgttggtgtcgtattcacgcgcactctgcgtacgttgctggttcatgtagtactgcttgtcggtctggcggctaaataccgtcagcatggtattgcgggcggtcatcgtctgctggttggtgatccagaaggttttataacccgcctgtttcatcatgttcatcaggctcggctgcgtcagatacagatccgggttcttttcattggcaaaggtcagcgcctgttgcaggatttcaatggtgtacggacgagacgtaactacgttattaaacacggtcagattcggatcggttttatgcagcgcatccagctccggcgtggtttcacgcggataaccgtacagactcatgcgtccgcgctgggtgctctcgccaatcaccagcactaaagtgcgcggttcgttaccgctttcatctttgaaattagccagtggcggcaaggcattattttcattcagtaactttgttaggctgtttagttgctgacgatactgataatagccggtcaggaattgccacggtgcggcaggctccatacggctggccaggttatccaacgttttctcaaacggcttgtttttgataaacgtattcatggcgatcggatgcagaatcaagccataaagcagggcaaaagagacaacataacgccacggctttggaatatagaccgggcgcaggcgtgtccacagcagaactgccaccgccgtataggccagcgcgataagcacaattttcaggctgaaatactggcttaaatactcgctggcttcgttggtgttggtttcgaacatcacaaacagaacgctctggctgaactcctgaccgtagatgacgtagtagcacagcgccgccagagaggccgcccatagcaccacgccgattactgcggcaataattttaatccgcttcggaaagaggaataccgggatcaaccacaggctactgaataacaggctgtcgcgaatgccgttagtgccactataaccactgatgtaaataatggcctgtagcagagtagagaaaaaccaaaagtagagcagtgcccaacccagggctttccagctaaaaagaggtttagcctggacttctgtggaatgcatagtaagaacctgtcttgaaaaaatatcgccgaatgtaacgacaattccttaaggatatctgaaggtatattcagaatttgaataaaatgcagacagaaatatattgaaaacgagggtgttagaacagaagtatttcagaaaaccctcgcgcaaaagcacgagggtttgcagaagaggaagattagccggtattacgcatacctgccgcaatcccggcaatagtgaccattaacgcttgttcgacgcgaggatccggttcctggccttctttttctgcctggcgggagcggtgcagcaactcggcctgcaatacgttcagcgggtcggtgtaaatattccgtagctgaatagactctgcaatccacggcagatcggccatcagatgggaatcgttggcaatcgccagcaccactttgatgtcttcttcttgcaggttgcgtaactctttacctaacggccacagtgctttgtctaccaggcgttggtcatagtattccgccagccacaggtctgctttggcgaagaccatctccagcatgccgagacgcgtgctgaagaatggccaatcgcggcacatagcctccagctcgctctgtttgccgtcttcgaccactttttgcagcgccgtacctgcacccagccaggcggggagcatcagacggttttgcgtccaggcgaagatccacggaatggcgcgtagactctcgacgccgccggttgggcgacgtttcgccggacgactacccaacggcagtttgcccagttcttgttccggcgtagcggagcggaagtaaggcacaaaatctttgttttcacgtacgtagccgcggtagacatcgcaggagatgacactcagttcatccataatgcgacgccagctctctttcggctccggcggtggcagcaggttggcttccagaatcgccccggtataaaggctcaggctgctgacggtgatttctggcagaccatatttaaagcggatcatctcgccctgttcggttacgcgcaggccgcctttcaggcttcctggcggttgactcagcagcgccgcatgagcaggtgcgccgccgcgaccaatggaaccgccgcgaccgtggaacaacgtcagctcaatacccgctttttcgcaggttttgattaatgcatcctgtgcctgatattgcgcccaggaagctgccatcactcccgcatcttttgcactgtcggaatagccaatcatcaccatctgtttgccctgaatcaggccacgataccagtcaatattgagcagctgggtcatgacatcgttggcgttgttcagatcatcgagggtttcaaacagcggagcaaccggcatcgcaaacccgatacccgcttctttcagcagcaggtggacagccagtacgtcggacggcgttttcgccatgctgatcacgtaggcggcaatggagccttgcggtgcttcggcaatcacctggcaggtatcgagcacttcgcgcgtttcggcgcttggttgccagttgcgcggcagaagcggacgtttggagttcagttcgcggatcaggaacgcctgtttgtcggcctcactccagctttcgtagtcgccgataccgaggtagcgggtcagctcgcccagcgcttcggtatgacgcgtgctctcctgacggatatcaatacggaccagcggtacgccgaaacatttcacgcggcgcagggtgtcgagcagatcgccgttggcgataatacccatgccacacgcctgaagactctggtagcaagcgtagagcggttcccacagttcttcgttttgtgtcagcaggccttctggttttggcagttcttcgcctttcaggcgcgcttccagccatgcctgtgtcgccatcaggcgagaacgcaggtttttcatcagatagcgatacggttctgcggcaccttcttcgccaaccagcgccagcagttcaggggtcgcttcaaccatgctcagttcagaaaccagcacctgaatatctttcaggaacaaatcggtggctttccagcggctgagtagcaggacgtggcgggtgatatcggcagtgacgttcgggttgccgtcgcggtcgccgcccatccagctagtaaaacggaccggaacaaattcgacgggcagtttgtagccgaggttctcttccagttgttcgttcagttcgcgcaggtaatttggtacgccttgccacaggctgttttccactacggcaaagccccatttggcttcatctaccgggcttggacgcagcttacggatttcatcggtatgccaactctgggcgatcaactggcgcaggcgacgcatcagctggttgtgttcgtagtcagcgatatctttgttatcgagctgttttaaacaggcgttcacttccaccattttgtggatcagtgtacgacgggtaatttcggttgggtgagccgtgaggaccagttccaggctcaggctttccactgcttttttgatggtgtcttcgctcagttccggctggtttttcagtttacgcagggtgcgggcgatcacttccgggttgctggcagcttcgcctttcgggctaatgctgtggtattgctcggcggtgttggccaggttcaggaactgactaaacgcacgcgcaacgggcagcagctcgtcgttgctcaaattttgtaaggtggtgagcaactcctggcggttagcatcattgccagcgcgactagatttgctcaacttacggatagtttctacgcgttcaagaatgtgttctcccaacgcatccttgatggtttctcccagcactttgccgagcatactgacattactacgcaatgcggaatattgttcgttcatattaccccagacaccccatcttatcgtttgatagccctgtatccttcacgtcgcattggcgcgaatatgctcgggctttgcttttcgtcgtcttttataaagccacgtaaaagcggtgacgtcaaatgctgcgaaatcgcttcagcaaacgaataaatagcaggaatttacgtcattaaattcacgacgctttaaataagcgtaacttatggaaatgttaaaaaatcgccccaagtaacaccaaaggtgtaggtcggataagatgcgcaagtatcgcatccgacattattgcggcactggagtttggcaacagtgccggatgcggcgcgagcgccttatccggcctacagttgggcatcgtttgagtcactgtcggtcggataagatgcgcaagtatcgcatccgacattattgcggcactggagtttggcaacagtgccggatgcggcgcgagcgccttatccggcctacggttgggcatcgtttgagtcactgtaggtcggataagatgcgcaagcatcgcatccgacattattgcggcactggagtttggcaacagcgccggatgcggcgcgagcgccttatccggcctacgttttaatgccagcaaaaatggtgaattacctgggttatcagttcgcgggtgggcttgataaaccgtgtttccagatattcatcaggttgatgagcctgattaatactgccaggccccaacaccagcgtcgggcataacgtttgaataaacggcgcttcggtacagtagttcaccacttcggtttttgctccgagcaatttctcaaccacttcaaccagttgatgattcggtgggcattcatagccagggatcggcggatgcagctcgtcgaccgtcagacgacccggccagcgttcgctcaccggagccaatgcatcgttgagcaaaccattaagttcattgagtgtcatgccaggcagcggacgaatatccatatgcaactcacagcaagcgcaaatacggttagaagcgtcgccaccgtgaatatgcccgaggttgagcgtagggtatggcacggtaaacgcttcgtagtgataacgttctttcaggttatcgcgcaattgcaaaatatgcccgatggcgtcgtgcattagttcgatagcgttaactccgcgtgctggatcgctggagtgcccgctctggccctgaatacggatggcgttagagatatgacctttatgtgcgcgtaccggttgtagactcgtcggttcgccaatgatggcgcaatccgggcgcagggcggtagtttcggcaaaataacgcgctccggccatactggtttcttcatcagcagtcgccagaatgtagagcggttttttcagtttcgtgacgtcgacatcgcgtagcgcatcaaggataaacgcaaaaaagcctttcatgtcggcggtgcctaagccgtaaagcttgccgtcatgctccgtcagtgtaaacggatcgcgcgtccagcgaccgtcatcaaatggcaccgtatcggtatgccccgccagcaacaagccgccagccccctgtccgatacttgccagcatattgaatttgttgcgagttcctggaacaggctgcacttccacattgaagcccaaatctttaaaccagtccgccagcagagtgattaaatctgcattgctttgatcgagtgcctcttccgtggcgcttatactaggtgtggcaatcagagcgcggtaaatctcgataaatggcggtaatttgtttttcattgttgacacacctctggtcatgatagtatcaatattcatgcagtatttatgaataaaaatacactaacgttgagcgtaataaaacccaccagccgtaaggtgaatgttttacgtttaacctggcaaccagacataagaaggtgaatagccccgatgttgaatacgctgattgtgggtgccagcggctacgctggcgcagagctagtgacctatgtaaatcgccatccgcatatgaacataaccgctttgactgttagtgcgcaaagcaatgatgcgggaaagttaatctccgatttgcatccgcagctaaaaggcatcgttgatctgccgttgcagccgatgagcgatatcagcgagtttagcccaggggtggacgtagtgtttctcgccaccgcccatgaagttagccacgatttagcgccgcagtttcttgaagcgggctgcgtggtgttcgacctttccggcgcgtttcgtgttaacgacgccaccttctatgaaaaatattacggctttacccatcaatacccggaactgttggaacaggcagcctacggtctggcggagtggtgcggtaataaattaaaagaagcgaatttgattgcggtgccgggctgttatccgacggcggcacagctggcgctgaaaccgttgattgatgccgatcttcttgacctcaatcagtggccggtgatcaacgccaccagcggcgtgagcggtgcagggcgtaaagcggccattagtaacagcttttgtgaagttagcctgcaaccgtatggcgtctttactcatcgccatcaaccagagatcgccacacacctcggtgctgacgttatcttcaccccacatctgggcaatttcccgcgcggcattctcgaaaccattacctgccgcctgaaaagcggtgtgacccaggcgcaagtcgcgcaagtgttacagcaggcgtatgcccataaaccgctggtgcggctgtatgacaaaggcgttccggcgctgaaaaatgtcgttgggctgccattttgcgatatcgggtttgccgttcagggcgagcatctgattattgtggcgaccgaagacaacttactgaaaggcgcggcggcacaagcggtacagtgcgccaatattcgtttcggctatgcggaaacgcagtctcttatttaagggtgcaatgatgaatccattaattatcaaactgggcggcgtactgctggatagtgaagaggcgctggaacgtctgtttagcgcactggtgaattatcgtgagagtcatcagcgtccgctggtgattgtgcacggcggcggttgcgtggtggatgagctgatgaaagggctgaatctgccggtgaaaaagaaaaacggcctgcgggtgacgcctgctgatcagatagacattatcaccggagcactggcgggaacggcaaataaaaccctgttggcatgggcgaagaaacatcagattgcggccgtaggtttgtttctcggtgacggcgacagcgtcaaagtgacccagcttgatgaagagttaggtcatgttggactggcgcagccaggtagccctaagcttatcaactccttgctggagaacggttatctgccggtggtcagctccattggcgtaacagacgaagggcaactgatgaacgtcaatgccgaccaggcggcaacggcgctggcggcaacgctgggcgcggatctgattttgctctccgacgtcagcggcattctcgacggcaaagggcaacgcattgccgaaatgaccgccgcgaaagcagaacaactgattgagcagggcattattactgacggcatgatagtgaaagtgaacgcggcgctggatgcggcccgcacgctgggccgtccggtagatatcgcctcctggcgtcatgcggagcagcttccggcactgtttaacggtatgccgatgggtacgcggattttagcttaagttttgttggccggaggcgcagctttccggcattgaatttcaaaataaggaaacagagttatggcactttggggcgggcgttttacccaggcagcagatcaacggttcaaacaattcaacgacagtctgcgctttgattaccgtctggcggagcaggatattgttggctctgtggcctggtccaaagccctggtcacggtaggcgtgttaaccgcagaagagcaggcgcaactggaagaggcgctgaacgtgttgctggaagatgttcgcgccaggccacaacaaatccttgaaagcgacgccgaagatatccatagctgggtggaaggcaaactgatcgacaaagtgggccagttaggcaaaaagctgcataccgggcgtagccgtaatgatcaggtagcgactgacctgaaactgtggtgcaaagataccgttagcgagttactgacggctaaccggcagctgcaaagcgcgctggtggaaaccgcacaaaacaatcaggacgcggtaatgccaggttacactcacctgcaacgcgcccagccggtgacgttcgcgcactggtgcctggcctatgttgagatgctggcgcgtgatgaaagccgtttgcaggatgcgcttaagcgtctggatgtcagcccgctaggctgtggcgcgctggcgggaacggcctatgaaatcgaccgtgaacagttagcaggctggctgggctttgctagcgcgacccgtaacagtctcgacagcgtttctgaccgtgaccatgtgttggaactgctttctgctgccgctatcggcatggtgcatctgagccgttttgctgaagatctgattttctttaacaccggcgaagcggggtttgtggagctttctgaccgcgtgacttccggtagtagtttaatgccgcagaagaaaaacccggatgcgctggagctgattcgcggtaaatgcggccgggtgcagggggcgttaaccggcatgatgatgacgctgaaaggtttgccgctggcttacaacaaagatatgcaggaagacaaagaaggtctgttcgacgcgctcgatacctggctggactgcctgcatatggcggcgctggtgctggacggcattcaggtgaaacgtccacgttgccaggaagcggctcagcagggttacgccaacgccaccgaactggcggattatctggtggcgaaaggcgtaccgttccgcgaggcgcaccatattgttggtgaagcggtggtggaagccattcgtcagggcaaaccgctggaagatctgccgctcagtgagttgcagaaattcagtcaggtgattgacgaagatgtctatccgattctgagcctgcaaagctgcctcgacaagcgtgcggcaaaaggcggcgtcagtccgcagcaggtggcgcaggcgattgcttttgcgcaggctcggttagggtaagaacatttatatgtataaatttgagcctggcttatcgccgggcttttttatggcaaaaaaaagcggatcctggagatccgcaaaagttcacgttggctttagttattcgagttgagaaactctcgaaacgggcagtgacttcaagggttaaaagaggtgccgctccgtttctgtgagcaattatcagtcagaatgcttgatagggataatcgttcattgctattctacctatcgccatgaactatcgtggcgatggaggatggataatgaatattcgtgatcttgagtacctggtggcattggctgaacaccgccattttcggcgtgcggcagattcctgccacgttagccagccgacgcttagcgggcaaattcgtaagctggaagatgagctgggcgtgatgttgctggagcggaccagccgtaaagtgttgttcacccaggcgggaatgctgctggtggatcaggcgcgtaccgtgctgcgtgaggtgaaagtccttaaagagatggcaagccagcagggcgagacgatgtccggaccgctgcacattggtttgattcccacagttggaccgtacctgctaccgcatattatccctatgctgcaccagacctttccaaagctggaaatgtatctgcatgaagcacagacccaccagttactggcgcaactggacagcggcaaactcgattgcgtgatcctcgcgctggtgaaagagagcgaagcattcattgaagtgccgttgtttgatgagccaatgttgctggctatctatgaagatcacccgtgggcgaaccgcgaatgcgtaccgatggccgatctggcaggggaaaaactgctgatgctggaagatggtcactgtttgcgcgatcaggcaatgggtttctgttttgaagccggggcggatgaagatacacacttccgcgcgaccagcctggaaactctgcgcaacatggtggcggcaggtagcgggatcactttactgccagcgctggctgtgccgccggagcgcaaacgcgatggggttgtttatctgccgtgcattaagccggaaccacgccgcactattggcctggtttatcgtcctggcagtccgctgcgcagccgctatgagcagctggcagaggccatccgcgcaagaatggatggccatttcgataaagttttaaaacaggcggtttaaaccgtttaacgcagctacccgataggcttccgccatcgtcgggtagttaaaggtggtgttgacgaagtactcaatagtgttgccgccacctttctgttccataatcgcctgaccgatatgaataatttcggcagcgcgctcgccaaagcagtgaatacccagaatctcttttgtttcccgatggaacaaaattttcagcgtgcccacgttcatgccgacgatttgtgcgcgtgccagatgtttaaactgggcgcggcccacttcatatggcactttcattgcggtcagctgctgttcggttttgcccacagagctgatttccgggatggtgtaaataccggtagggatatcttcaatcagatgtgcggtggcttcgccttttaccagcgcctgcgcggcaatgcgcccctggtcataggccgcgctcgccaggctcggataaccaatcacgtcgcccaccgcgtaaacgtgtggctgtgcggtctgatacatgctgttgaccttcagctgtccgcggctgtcagtttctagcccaatgttctgtaacgccaggctatcggtattaccggtgcgaccgttggcatagagcaggcagtcagctttcagttttttaccgctcttcagatgcatgatcacaccatcgtcacagccttcgatcttctcgtactcttcgttgtgacgaatcactacgccactgttccagaagtgataggagagagaatcactcatctcttgatcgagaaatgccagcaggcgatcgcgggtgttgatcagatccacttttacatccataccgcggaagatgctcgcatattcacagccgatcactccagcaccatagataagtacatggcgcggttcgtggtgcatgctgagaatactgtcgctgtcgtaaatgcgtggatgggtgaaatcaacatctgttggatgatatggacgagagccgcaggcaataacaaatttttcagcggttagtgtttcaacgctgccgtccgggcaatccagcgccaacgtatgctcgtcaacaaagcgagcgtttccctgcaatatttcacagtgattacgttcgtaaaatccctgacgcatgcgcgtttgttgattaatcacgttatcggcatggttaaggatatcggcaaaagaagagcggagcagtcgggaatggtcgctgtaaagtgggttttgattgaattctataatgcggctgacggcgtgacggagagctttgctcgggatggtgccccagtgggtgcaaccgccgccaacattttgataacgctcgataactgcgacgcgcgcaccttgcttaaccaggcccattgcagcgccttcgccgccggggccggaacctattactatggcatcgtaatcgtaggaatgtggcatggtagggcttacctgttcttatacataaaagcaacagaatggtaacattttatcgcgggtaagccaattgatccccgtcatttatctggctatatcctgagcggcctttgctttgtctgtttcttacttttgccctgacgttttattggatttttatcgacgatactctccgtttaagcggcaggtttccgctgtacgtaaaagaaccggccaaagaattgcagtaaatatgttttattgcgttaccgttcattcacaatactggagcaatccagtatgttcattctctggtatagtgccagcagtacttttggcaaggatagtgacatcgtgatgggcgtaagagcgcaacaaaaagaaaaaacccgccgtagcctggtggaagccgcatttagccaattaagtgctgaacgcagcttcgccagcctgagtttgcgtgaagtggcgcgtgaagcgggcattgctcccacctctttttatcggcatttccgcgacgtagacgaactgggtctgaccatggttgatgagagcggtttaatgctacgccaactcatgcgccaggcgcgtcagcgtatcgccaaaggcgggagtgtgatccgcaccagcgtctccacatttatggagttcatcggtaataatcctaacgccttccggttattattgcgggaacgctccggcacctccgctgcgtttcgtgccgccgttgcgcgtgaaattcagcacttcattgcggaacttgcggactatctggaactcgaaaaccatatgccgcgtgcgtttactgaagcgcaagccgaagcaatggtgacaattgtcttcagtgcgggtgccgaggcgttggacgtcggcgtcgaacaacgtcggcaattagaagagcgactggtactgcaactgcgaatgattagcaaaggggcttattactggtatcgccgtgaacaagagaaaaccgcaattattccgggaaatgtgaaggacgagtaatgaaacaagcaaatcaagatagaggtacgctgctgctggcgttagttgctggcttaagcattaatggtactttcgcagcgctgtttagctccattgtgccattttctgtattcccgattatttccctggtgctgacggtttactgcctgcatcaacgttatcttaatcgcactatgccggtaggcttgccgggtctggcagctgcctgttttattctcggcgtactgctgtacagcacggtagttcgtgcggaatatccggatatcggctctaacttcttcccggcagtactctccgtcattatggtgttctggattggcgcgaagatgcgtaaccgtaagcaggaagttgctgagtaatcggtattatgccggatgctggcgcatccggcatgggttttacttcgcggtcagtaatacgccgcactccatatggtgcgtgtaggggaactgatcaaacagagccagacgttcgaccttgtgcgtctggcttaatgtttccagattcttgcataacgtttccgggttacaggagatgtacaaaatacgcggatacgcctgcaccattttctcggtttcactgtccagaccgctgcgcggagggtcgacaaaaatggtttcgcactgataactctttaagtcgatcccttgcaggcggttaaactcgcgcacaccattcatcgcctgagtaaattcttctgccgccatacgaataatttgtacgttatcaatatggttagctgcgatgttgtattgcgcagcagcaacgctcggcttagcgatttcggtggctaatacccgatcaaaattacgcgccagcgctaaactaaagttaccgttgccgcagtacagctccagtaaatcgcctttactgcctttggttacgtccagcgcccattccagcatctgaatattcatcgccgcgttcggctgggtaaagctgttttctacctgacggtagatcatctctttccctgcgaccggcagacgttcatcgatgtaatcctgatccagctcgattttggttttcgttgcccgaccaatcagatgcacattcagattctgcgcgcgcagtgcatcgcgcagggcctccgcttcctgacgccactcatcatccagcttcttatggtatagcagggaaaccaccgcctgattactcagtgtagtgaggtaatcaatctggaacaacttgtggcgcagaacgggattattacgcacacccgcaatcatcgccgtcatcaactggttgataagttcactggcggcggggaagctatccacgcggatgcggcttttggtttgttgatcgaaaatgatgtgatacaggtcatcgccatcgtgccagatgcggaactccgcgcgcatccggtaatgactgaccgggctgcgaaacacttccggaaccaggtcagaaaacggtgccatcatactttgcaaacgtaccactttttcggctaactgcgcttcatactgttctgttggaaggtgttcgggggtcatgatgtatcctgaaaaattaaagtacgcggcgattgtagggattgctcatcagatgtccagatcttgatgaattcctatttgtgagctacgtctggacagtaacttgttacaacctgtagcatccacttgccggtcctgtgagttaatagggaatccagtgcgaatctggagctgacgcgcagcggtaaggaaaggtgcgatgattgcgttatgcggacactgccattcggtgggaagtcatcatctcttagtatcttagatacccctccaagcccgaagacctgccggccaacgtcgcatctggttctcatcatcgcgtaatattgatgaaacctgcggcatccttcttctattgtggatgctttacaatgattaaaaaagctagcctgctgacggcgtgttccgtcacggcattttccgcttgggcacaggataccagcccggatactctcgtcgttactgctaaccgttttgaacagccgcgcagcactgtgcttgcaccaaccaccgttgtgacccgtcaggatatcgaccgctggcagagcaccagcgtcaatgatgtgctgcgccgtcttccgggcgtcgatatcacccaaaacggcggtagtggtcagctcagttctatttttattcgcggtacaaatgccagtcatgtgttggtgttaattgatggcgtacgcctgaatctggcgggggtgagtggttctgccgaccttagccagttccctattgcgcttgtccagcgtgttgaatatatccgtgggccgcgctccgctgtttatggttccgatgcaataggcggggtggtgaatatcatcacgacgcgcgatgaacccggaacggaaattagtgcagggtggggaagcaatagttatcagaactatgatgtctctacgcagcaacaactgggggataagacacgggtaacgctgttgggcgattatgcccatactcatggttatgatgttgttgcctatggtaataccggaacgcaagcgcagacagataacgatggttttttaagtaaaacgctttatggcgcgctggagcataactttactgatgcctggagcggctttgtgcgcggctatggctatgataaccgtaccaattatgacgcgtattattctcccggtagtccgttgctcgatacccgtaaactctatagccaaagttgggacgccgggctgcgctataacggcgaactgattaaaagtcaactcattaccagctatagccatagcaaagattacaactacgatccccattatggtcgttatgatagcagcgcgacgctcgatgagatgaagcaatacaccgtccagtgggcaaacaatgtcatcgttggtcacggtagtattggtgcgggtgtcgactggcagaaacagactacgacgccgggtacaggttatgttgaggatggatatgatcaacgtaataccggcatctatctgaccgggctgcaacaagtcggcgattttacctttgaaggcgcagcacgcagtgacgataacagtcagtttggtcgtcatggaacctggcaaaccagcgccggttgggaattcatcgaaggttatcgcttcattgcttcctacgggacatcttataaggcaccaaatctggggcaactgtatggcttctacggaaatccgaatctggacccggagaaaagcaaacagtgggaaggcgcgtttgaaggcttaaccgctggggtgaactggcgtatttccggatatcgtaacgatgtcagtgacttgatcgattatgatgatcacaccctgaaatattacaacgaagggaaagcgcggattaagggcgtcgaggcgaccgccaattttgataccggaccactgacgcatactgtgagttatgattatgtcgatgcgcgcaatgcgattaccgacacgccgttgttacgccgtgctaaacagcaggtgaaataccagctcgactggcagttgtatgacttcgactggggtattacttatcagtatttaggcactcgctatgataaggattacagttcttatccttatcaaaccgttaaaatgggcggtgtgagcttgtgggatcttgcggttgcgtatccggtcacctctcacctgacagttcgtggtaaaatagccaacctgttcgacaaagattatgagacagtctatggctaccaaactgcaggacgggaatacaccttgtctggcagctacaccttctgaaccacgtcccaccgtgctggtgtttgactccggcgtcggtgggttgagcgtctatgacgagatccggcatctcttaccggatctccattacatttatgctttcgataacgtcgctttcccgtatggcgaaaaaagcgaagcgtttattgttgagcgagtggtggcaattgtcaccgcggtgcaagaacgttatccccttgcgctggctgtggtcgcttgcaacactgccagtaccgttagtcttcctgcattacgcgaaaagttcgacttcccggttgttggtgtcgtgccggcgattaaacctgctgcacgtctgacggcaaatggcattgtcggattactggcaacccgcggaacagttaaacgttcttatactcatgagctgatcgcgcgtttcgctaatgaatgccagatagaaatgctgggcagcgcagagatggttgagttggctgaagcgaagctacatggcgaagatgtttctctggatgcactaaaacgtatcctacgcccgtggttaagaatgaaagagccgccagataccgttgtattgggttgcacccatttccctctactacaagaagaactgttacaagtgctgccagagggaacccggctggtggattctggcgcagcgattgctcgccgaacggcctggttgttagaacatgaagccccggatgcaaaatctgccgatgcgaatattgccttttgtatggcaatgacgccaggagctgaacaattattgcccgttttacagcgttacggcttcgaaacgctcgaaaaactggcagttttaggctgatttggttgaatgttgcgcggtcagaaaattattttaaatttcctcttgtcaggccggaataactccccataatgcgccaccactgacacggaacaacggcaaacacgccgccgggtcagcggggttctcctgagaactccggcagagaaagcaaaaataaatgcttgactctgtagcgggaaggcgtattatgcacaccccgcgccgctgagaaaaagcgaagcggcactgctctttaacaatttatcagacaatctgtgtgggcactcgaagatacggattcttaacgtcgcaagacgaaaaatgaataccaagtctcaagagtgaacacgtaattcattacgaagtttaattctttgagcgtcaaacttttaaattgaagagtttgatcatggctcagattgaacgctggcggcaggcctaacacatgcaagtcgaacggtaacaggaagaagcttgcttctttgctgacgagtggcggacgggtgagtaatgtctgggaaactgcctgatggagggggataactactggaaacggtagctaataccgcataacgtcgcaagaccaaagagggggaccttcgggcctcttgccatcggatgtgcccagatgggattagctagtaggtggggtaacggctcacctaggcgacgatccctagctggtctgagaggatgaccagccacactggaactgagacacggtccagactcctacgggaggcagcagtggggaatattgcacaatgggcgcaagcctgatgcagccatgccgcgtgtatgaagaaggccttcgggttgtaaagtactttcagcggggaggaagggagtaaagttaatacctttgctcattgacgttacccgcagaagaagcaccggctaactccgtgccagcagccgcggtaatacggagggtgcaagcgttaatcggaattactgggcgtaaagcgcacgcaggcggtttgttaagtcagatgtgaaatccccgggctcaacctgggaactgcatctgatactggcaagcttgagtctcgtagaggggggtagaattccaggtgtagcggtgaaatgcgtagagatctggaggaataccggtggcgaaggcggccccctggacgaagactgacgctcaggtgcgaaagcgtggggagcaaacaggattagataccctggtagtccacgccgtaaacgatgtcgacttggaggttgtgcccttgaggcgtggcttccggagctaacgcgttaagtcgaccgcctggggagtacggccgcaaggttaaaactcaaatgaattgacgggggcccgcacaagcggtggagcatgtggtttaattcgatgcaacgcgaagaaccttacctggtcttgacatccacggaagttttcagagatgagaatgtgccttcgggaaccgtgagacaggtgctgcatggctgtcgtcagctcgtgttgtgaaatgttgggttaagtcccgcaacgagcgcaacccttatcctttgttgccagcggtccggccgggaactcaaaggagactgccagtgataaactggaggaaggtggggatgacgtcaagtcatcatggcccttacgaccagggctacacacgtgctacaatggcgcatacaaagagaagcgacctcgcgagagcaagcggacctcataaagtgcgtcgtagtccggattggagtctgcaactcgactccatgaagtcggaatcgctagtaatcgtggatcagaatgccacggtgaatacgttcccgggccttgtacacaccgcccgtcacaccatgggagtgggttgcaaaagaagtaggtagcttaaccttcgggagggcgcttaccactttgtgattcatgactggggtgaagtcgtaacaaggtaaccgtaggggaacctgcggttggatcacctccttaccttaaagaagcgtactttgtagtgctcacacagattgtctgatagaaagtgaaaagcaaggcgtttacgcgttgggagtgaggctgaagagaataaggccgttcgctttctattaatgaaagctcaccctacacgaaaatatcacgcaacgcgtgataagcaattttcgtgtccccttcgtctagaggcccaggacaccgccctttcacggcggtaacaggggttcgaatcccctaggggacgccacttgctggtttgtgagtgaaagtcgccgaccttaatatctcaaaactcatcttcgggtgatgtttgagatatttgctctttaaaaatctggatcaagctgaaaattgaaacactgaacaacgagagttgttcgtgagtctctcaaattttcgcaacacgatgatgaatcgaaagaaacatcttcgggttgtgaggttaagcgactaagcgtacacggtggatgccctggcagtcagaggcgatgaaggacgtgctaatctgcgataagcgtcggtaaggtgatatgaaccgttataaccggcgatttccgaatggggaaacccagtgtgtttcgacacactatcattaactgaatccataggttaatgaggcgaaccgggggaactgaaacatctaagtaccccgaggaaaagaaatcaaccgagattcccccagtagcggcgagcgaacggggagcagcccagagcctgaatcagtgtgtgtgttagtggaagcgtctggaaaggcgcgcgatacagggtgacagccccgtacacaaaaatgcacatgctgtgagctcgatgagtagggcgggacacgtggtatcctgtctgaatatggggggaccatcctccaaggctaaatactcctgactgaccgatagtgaaccagtaccgtgagggaaaggcgaaaagaaccccggcgaggggagtgaaaaagaacctgaaaccgtgtacgtacaagcagtgggagcacgcttaggcgtgtgactgcgtaccttttgtataatgggtcagcgacttatattctgtagcaaggttaaccgaataggggagccgaagggaaaccgagtcttaactgggcgttaagttgcagggtatagacccgaaacccggtgatctagccatgggcaggttgaaggttgggtaacactaactggaggaccgaaccgactaatgttgaaaaattagcggatgacttgtggctgggggtgaaaggccaatcaaaccgggagatagctggttctccccgaaagctatttaggtagcgcctcgtgaattcatctccgggggtagagcactgtttcggcaagggggtcatcccgacttaccaacccgatgcaaactgcgaataccggagaatgttatcacgggagacacacggcgggtgctaacgtccgtcgtgaagagggaaacaacccagaccgccagctaaggtcccaaagtcatggttaagtgggaaacgatgtgggaaggcccagacagccaggatgttggcttagaagcagccatcatttaaagaaagcgtaatagctcactggtcgagtcggcctgcgcggaagatgtaacggggctaaaccatgcaccgaagctgcggcagcgacgcttatgcgttgttgggtaggggagcgttctgtaagcctgcgaaggtgtgctgtgaggcatgctggaggtatcagaagtgcgaatgctgacataagtaacgataaagcgggtgaaaagcccgctcgccggaagaccaagggttcctgtccaacgttaatcggggcagggtgagtcgacccctaaggcgaggccgaaaggcgtagtcgatgggaaacaggttaatattcctgtacttggtgttactgcgaaggggggacggagaaggctatgttggccgggcgacggttgtcccggtttaagcgtgtaggctggttttccaggcaaatccggaaaatcaaggctgaggcgtgatgacgaggcactacggtgctgaagcaacaaatgccctgcttccaggaaaagcctctaagcatcaggtaacatcaaatcgtaccccaaaccgacacaggtggtcaggtagagaataccaaggcgcttgagagaactcgggtgaaggaactaggcaaaatggtgccgtaacttcgggagaaggcacgctgatatgtaggtgaggtccctcgcggatggagctgaaatcagtcgaagataccagctggctgcaactgtttattaaaaacacagcactgtgcaaacacgaaagtggacgtatacggtgtgacgcctgcccggtgccggaaggttaattgatggggttagcgcaagcgaagctcttgatcgaagccccggtaaacggcggccgtaactataacggtcctaaggtagcgaaattccttgtcgggtaagttccgacctgcacgaatggcgtaatgatggccaggctgtctccacccgagactcagtgaaattgaactcgctgtgaagatgcagtgtacccgcggcaagacggaaagaccccgtgaacctttactatagcttgacactgaacattgagccttgatgtgtaggataggtgggaggctttgaagtgtggacgccagtctgcatggagccgaccttgaaataccaccctttaatgtttgatgttctaacgttgacccgtaatccgggttgcggacagtgtctggtgggtagtttgactggggcggtctcctcctaaagagtaacggaggagcacgaaggttggctaatcctggtcggacatcaggaggttagtgcaatggcataagccagcttgactgcgagcgtgacggcgcgagcaggtgcgaaagcaggtcatagtgatccggtggttctgaatggaagggccatcgctcaacggataaaaggtactccggggataacaggctgataccgcccaagagttcatatcgacggcggtgtttggcacctcgatgtcggctcatcacatcctggggctgaagtaggtcccaagggtatggctgttcgccatttaaagtggtacgcgagctgggtttagaacgtcgtgagacagttcggtccctatctgccgtgggcgctggagaactgaggggggctgctcctagtacgagaggaccggagtggacgcatcactggtgttcgggttgtcatgccaatggcactgcccggtagctaaatgcggaagagataagtgctgaaagcatctaagcacgaaacttgccccgagatgagttctccctgaccctttaagggtcctgaaggaacgttgaagacgacgacgttgataggccgggtgtgtaagcgcagcgatgcgttgagctaaccggtactaatgaaccgtgaggcttaaccttacaacgccgaagctgttttggcggatgagagaagattttcagcctgatacagattaaatcagaacgcagaagcggtctgataaaacagaatttgcctggcggcagtagcgcggtggtcccacctgaccccatgccgaactcagaagtgaaacgccgtagcgccgatggtagtgtggggtctccccatgcgagagtagggaactgccaggcatcaaataaaacgaaaggctcagtcgaaagactgggcctttcgttttatctgttgtttgtcggtgaacgctctcctgagtaggacaaatccgccgggagcggatttgaacgttgcgaagcaacggcccggagggtggcgggcaggacgcccgccataaactgccaggcatcaaattaagcagaaggccatcctgacggatggcctttttgcgtttctacaaactcttcctgtcgtcatatctacaagccatccccccacagatacggtaaactagcctcgtttttgcatcaggaaagcagctatgaaccactccttaaaaccctggaacacatttggcattgatcataatgctcagcacattgtatgtgccgaagacgaacaacaattactcaatgcctggcagtatgcaaccgcagaaggacaacccgttcttattctgggtgaaggaagtaatgtactttttctggaggactatcgcggcacggtgatcatcaaccggatcaaaggtatcgaaattcatgatgaacctgatgcgtggtatttacatgtaggagccggagaaaactggcatcgtctggtaaaatacactttgcaggaaggtatgcctggtctggaaaatctggcattaattcctggttgtgtcggcagtagtcctatccagaatattggtgcttatggcgtagaattacagcgagtttgcgcttatgttgattctgttgaactggcgacaggcaagcaagtgcgcttaactgccaaagagtgccgttttggctatcgcgacagtatttttaaacatgaataccaggaccgcttcgctattgtagccgtaggtctgcgtctgccaaaagagtggcaacctgtactaacgtatggtgacttaactcgtctggatcctacaacagtaacgccacagcaagtatttaatgcggtgtgtcatatgcgcaccaccaaactccctgatccaaaagtgaatggcaatgccggtagtttcttcaaaaaccctgttgtatctgccgaaacggctaaagcattactgagtcaatttccaacagcaccaaattacccccaggcggatggtagtgtaaaactggcagcaggttggcttatcgatcagtgccagctaaaagggatgcaaataggtggggctgcggtgcaccgtcaacaggcgttagttctcattaatgaagacaatgcaaaaagcgaagatgttgtacagctggcgcatcatgtaagacagaaagttggtgaaaaatttaatgtctggcttgagcctgaagtccgctttattggtgcaagtggtgaagtgagcgcagtggagacaattagttgaaataaagcgcagtggagacaatttcatgaaggataacaccgtgccactgaaattgattgccctgttagcgaacggtgaatttcactctggcgagcagttgggtgaaacgctgggaatgagccgggcggctattaataaacacattcagacactgcgtgactggggcgttgatgtctttaccgttccgggtaaaggatacagcctgcctgagcctatccagttacttaatgctaaacagatattgggtcagctggatggcggtagtgtagccgtgctgccagtgattgactccacgaatcagtaccttcttgatcgtatcggagagcttaaaagcggcgatgcttgcattgcagaataccagcaggctggccgtggtcgccggggtcggaaatggtttagcccttttggcgcaaacttatatttgagcatgttctggcgtctggaacaaggcccggcggcggcgattggtttaagtctggttatcggtatcgtgatggcggaagtattacgcaagctgggtgcagataaagttcgtgttaaatggcctaatgacctctatctgcaggatcgcaagctggcaggcattctggtggagctgactggcaaaactggcgatgcggcgcaaatagtcattggagccgggatcaacatggcaatgcgccgtgttgaagagagtgtcgttaatcaggggtggatcacgctgcaggaagcggggatcaatctcgatcgtaatacgttggcggccatgctaatacgtgaattacgtgctgcgttggaactcttcgaacaagaaggattggcaccttatctgagccgctgggaaaagctggataattttattaatcgcccagtgaaacttatcattggtgataaagaaatatttggcattagtcgcggaatagacaaacagggggctttattacttgagcaggatggaataataaaaccctggatgggcggtgaaatatccctgcgtagtgcagaaaaataagaaaggggagtattcgctcccctgcaaattatttgcgtagtctgacctcttctaccgcatgattagcacttttcgtcaggattaaactggcgcgctcacgagtaggtagaatattttgctttaagttcagccagttgatctctttccacaatgtcatggcagtcttaatcgcttcttctttagttaatttcgcgtagttatgaaaataggaatccgggtcggtaaaagccccttcgcggaatttcagaaaacggttgatataccatgtctgaagtaagtcttccggtgcatcaacatatatgctaaaatcgacaaaatcagaaacaaatacatgatgtggatcgtgtggataatccatcccgctctgtaagacatttaacccttcaagaattaaaatatcaggctgaacaaccgttttatctccatccgggatcacatcataaataagatgactgtaaacaggtgctgtaacgtttggcacgccggatttgagatcggaaacaaacttcaccaggcgatgcatatcatagctttccgggaagcctttcttcttcatcagaccacgttctttcagaacctgattagggtgaaggaagccatctgtagtgatcagttcaacacgacgatgttccggccaacggcttaatagcgcctgcaatacacgggcggttgtacttttccccaccgcgacactgccagcaatactgataatgtaaggaatgcgttgcccgttggtaccaagaaactgttccagaactgcctgacggcgcagattgctgcttatatagaagttcagcaaacgactcaaaggtaaatagatctcggcaacttcttctaagctgagatcttcattaatacctttgagacgggcgatctcatcttcgcttaacgtcataggtacggaatcacgcagagctgcccactggttgcggtcaaactgtaggtaaggcgtcattaacgtttgctcttttatactcataagcatgtttctggcggtcatagctctatcggcaaagcgatatttgccatggcgcgtcacagttctgttgaatgggttaatgggcaggagggtaacaccagatggggaggaataataagaaaaaatctctgccaggaagctatcgttgaaaagcaatgtgacagatattccatctgataaaaagaattatggtttagcaggagcgcattgttgagcacaatgatgttgaaaaagtgtgctaatctgccctccgttcggctgtttcttcatcgtgtcgcataaaatgtgaccaataaaacaaattatgcaattttttagttgcatgaactcgcatgtctccatagaatgcgcgctacttgatgccgacttagctcagtaggtagagcaactgacttgtaatcagtaggtcaccagttcgattccggtagtcggcaccatcaagtccggtggggttcccgagcggccaaagggagcagactgtaaatctgccgtcacagacttcgaaggttcgaatccttcccccaccaccaatttcggccacgcgatggcgtagcccgagacgataagttcgcttaccggctcgaataaagagagcttctctcgatattcagtgcagaatgaaaatcaggtagccgagttccaggatgcgggcatcgtataatggctattacctcagccttccaagctgatgatgcgggttcgattcccgctgcccgctccaagatgtgctgatatagctcagttggtagagcgcacccttggtaagggtgaggtcggcagttcgaatctgcctatcagcaccacttcttttctcctccctgttttttccttctgtttattgcattcaacaagtcgggcatgttgcctggttgatgtggtgatatcaccgatttatccgtgtcttagagggacaatcgatgtctaaagaaaagtttgaacgtacaaaaccgcacgttaacgtcggtactatcggccacgttgaccatggtaaaacaacgctgaccgctgcaatcactaccgtactggctaaaacctacggcggtgctgctcgcgcattcgaccagatcgataacgcgccggaagaaaaagctcgtggtatcaccatcaacacttctcacgttgaatacgacaccccgacccgccactacgcacacgtagactgcccggggcacgccgactatgttaaaaacatgatcaccggtgctgcgcagatggacggcgcgatcctggtagttgctgcgactgacggcccgatgccgcagactcgtgagcacatcctgctgggtcgtcaggtaggcgttccgtacatcatcgtgttcctgaacaaatgcgacatggttgatgacgaagagctgctggaactggttgaaatggaagttcgtgaacttctgtctcagtacgacttcccgggcgacgacactccgatcgttcgtggttctgctctgaaagcgctggaaggcgacgcagagtgggaagcgaaaatcctggaactggctggcttcctggattcttacattccggaaccagagcgtgcgattgacaagccgttcctgctgccgatcgaagacgtattctccatctccggtcgtggtaccgttgttaccggtcgtgtagaacgcggtatcatcaaagttggtgaagaagttgaaatcgttggtatcaaagagactcagaagtctacctgtactggcgttgaaatgttccgcaaactgctggacgaaggccgtgctggtgagaacgtaggtgttctgctgcgtggtatcaaacgtgaagaaatcgaacgtggtcaggtactggctaagccgggcaccatcaagccgcacaccaagttcgaatctgaagtgtacattctgtccaaagatgaaggcggccgtcatactccgttcttcaaaggctaccgtccgcagttctacttccgtactactgacgtgactggtaccatcgaactgccggaaggcgtagagatggtaatgccgggcgacaacatcaaaatggttgttaccctgatccacccgatcgcgatggacgacggtctgcgtttcgcaatccgtgaaggcggccgtaccgttggcgcgggcgttgtagcaaaagttctgagctaattgccgataacatttgacgcaatgcgcactaaaagggcatcatttgatgccctttttgcacgctttcgtaccagaacctggctcatcagtgattttctttgtcataatcattgctgagacaggctctgttgagggcgtataatccgaaaagctaatacgcgtttcgatttggtttgcctcgcgatcgcggggtgaaaatgtttgtagaaaacttctgacaggttggtttatgagtgcgaataccgaagctcaaggaagcgggcgcggcctggaagcgatgaagtgggtcgttgtggtggcattgctcctggtggcgattgtcggcaactatctttatcgcgacattatgctgccgctgcgtgcgctggccgtagtaattctgattgctgcagcgggtggtgtcgcgctgttaacgacaaaaggtaaagctaccgttgcttttgcccgtgaagcgcgtaccgaagtccgtaaggtcatttggccgactcgccaggaaacattgcacaccacgctgattgtggctgcggttaccgcagtaatgagtctgatcctgtggggactggatggtattctggttcgcctggtatcctttatcactggcctgaggttctgagatgtctgaagctcctaaaaagcgctggtacgtcgttcaggcgttttccggttttgaaggccgcgtagcaacgagcctgcgtgagcatatcaaattacacaacatggaagatttgtttggtgaagtcatggtaccaaccgaagaagtggttgaaatccgtggcggtcagcgtcgcaaaagcgaacgtaaattcttccctggctacgtcctcgttcagatggtgatgaacgacgcgagctggcacctggtgcgcagcgtaccgcgtgtgatgggcttcatcggcggtacttccgatcgtcctgcgccaatcagcgataaagaagtcgatgcgattatgaaccgcctgcagcaggttggtgataagccgcgtccgaaaacgctgtttgaaccgggtgaaatggtccgtgttaatgatggtccgttcgctgacttcaacggtgttgttgaagaagtggattacgagaaatctcgtctgaaagtgtctgtttctatcttcggtcgtgcgaccccggtagagctggacttcagccaggttgaaaaagcctaacccagcgatcaaaaaagcggcgatttaatcgttgcacaaggcgtgagattggaatacaatttcgcgccttttgtttttatgggccttgcccgtaaaacgattttttatatcacggggagcctctcagaggcgttattacccaacttgaggaatttataatggctaagaaagtacaagcctatgtcaagctgcaggttgcagctggtatggctaacccgagtccgccagtaggtccggctctgggtcagcagggcgtaaacatcatggaattctgcaaagcgttcaacgcaaaaactgattccatcgaaaaaggtctgccgattccggtagtaatcaccgtttacgctgaccgttctttcactttcgttaccaagaccccgccggcagcagttctgctgaaaaaagcggctggtatcaagtctggttccggtaagccgaacaaagacaaagtgggtaaaatttcccgcgctcagctgcaggaaatcgcgcagaccaaagctgccgacatgactggtgccgacattgaagcgatgactcgctccatcgaaggtactgcacgttccatgggcctggtagtggaggactaagaaatggctaaactgaccaagcgcatgcgtgttatccgcgagaaagttgatgcaaccaaacagtacgacatcaacgaagctatcgcactgctgaaagagctggcgactgctaaattcgtagaaagcgtggacgtagctgttaacctcggcatcgacgctcgtaaatctgaccagaacgtacgtggtgcaactgtactgccgcacggtactggccgttccgttcgcgtagccgtatttacccaaggtgcaaacgctgaagctgctaaagctgcaggcgcagaactggtaggtatggaagatctggctgaccagatcaagaaaggcgaaatgaactttgacgttgttattgcttctccggatgcaatgcgcgttgttggccagctgggccaggttctgggtccgcgcggcctgatgccaaacccgaaagtgggtactgtaacaccgaacgttgctgaagcggttaaaaacgctaaagctggccaggttcgttaccgtaacgacaaaaacggcatcatccacaccaccatcggtaaagtggactttgacgctgacaaactgaaagaaaacctggaagctctgctggttgcgctgaaaaaagcaaaaccgactcaggcgaaaggcgtgtacatcaagaaagttagcatctccaccaccatgggtgcaggtgttgcagttgaccaggctggcctgagcgcttctgtaaactaatgcctttacgtgggcggtgattttgtctacaatcttacccccacgtataatgcttaatgcagacgtatatccgagatattcgggttgtggcaaggcggcaactgagtgagtcgccaggagcatagctaactatgtgactggtgcgaatgaaggaagccaacgccgtcacaagctgaatagcgacggatagaaaagatttgttcgttggagcctggcctatccaggcctccgtcgaagaccgcaggagtttcgcaagaaacttaatcccctgcgtagacggtgacagaacgctaagattattcttttatattctggcttgtttctgctcaccgtaattaagacgctctctccgtttggaggagtgaagtgagttccagagattttctctggcaaacatccaggagcaaagctaatggctttaaatcttcaagacaaacaagcgattgttgctgaagtcagcgaagtagccaaaggcgcgctgtctgcagtagttgcggattcccgtggcgtaactgtagataaaatgactgaactgcgtaaagcaggtcgcgaagctggcgtatacatgcgtgttgttcgtaacaccctgctgcgccgtgctgttgaaggtactccgttcgagtgcctgaaagacgcgtttgttggtccgaccctgattgcatactctatggaacacccgggcgctgctgctcgtctgttcaaagagttcgcgaaagcgaatgcaaaatttgaggtcaaagccgctgcctttgaaggtgagctgatcccggcgtctcagatcgaccgcctggcaactctgccgacctacgaagaagcaattgcacgcctgatggcaaccatgaaagaagctagcgctggcaaactggttcgtactctggctgctgtacgcgatgcgaaagaagctgcttaatcgcagttatctttttaacgcattcgcttacgtataaacttattctgatattcaggaacaatttaaatgtctatcactaaagatcaaatcattgaagcagttgcagctatgtctgtaatggacgttgtagaactgatctctgcaatggaagaaaaattcggtgtttccgctgctgctgctgtagctgtagctgctggcccggttgaagctgctgaagaaaaaactgaattcgacgtaattctgaaagctgctggcgctaacaaagttgctgttatcaaagcagtacgtggcgcaactggcctgggtctgaaagaagctaaagacctggtagaatctgcaccggctgctctgaaagaaggcgtgagcaaagacgacgcagaagcactgaaaaaagctctggaagaagctggcgctgaagttgaagttaaataagccaacccttccggttgcagcctgagaaatcaggctgatggctggtgactttttagtcaccagcctttttgcgctgtaaggcgccagtagcgtttcacactgtttgactactgctgtgcctttcaatgcttgtttctatcgacgacttaatatactgcgacaggacgtccgttctgtgtaaatcgcaatgaaatggtttaagcgtgatagcaacaggcattgcggaaagtgttccattttccggtcaacaaaatagtgttgcacaaactgtccgctcaatggacagatgggtcgacttgtcagcgagctgaggaaccctatggtttactcctataccgagaaaaaacgtattcgtaaggattttggtaaacgtccacaagttctggatgtaccttatctcctttctatccagcttgacagctttcagaaatttatcgagcaagatcctgaagggcagtatggtctggaagctgctttccgttccgtattcccgattcagagctacagcggtaattccgagctgcaatacgtcagctaccgccttggcgaaccggtgtttgacgtccaggaatgtcaaatccgtggcgtgacctattccgcaccgctgcgcgttaaactgcgtctggtgatctatgagcgcgaagcgccggaaggcaccgtaaaagacattaaagaacaagaagtctacatgggcgaaattccgctcatgacagacaacggtacctttgttatcaacggtactgagcgtgttatcgtttcccagctgcaccgtagtccgggcgtcttctttgactccgacaaaggtaaaacccactctagcggtaaagtgctgtataacgcgcgtatcatcccttaccgtggttcctggctggacttcgaattcgatccgaaggacaacctgttcgtacgtatcgaccgtcgccgtaaactgcctgcgaccatcattctgcgcgccctgaactacaccacagagcagatcctcgacctgttctttgaaaaagttatctttgaaatccgtgataacaagctgcagatggaactggtgccggaacgcctgcgtggtgaaaccgcatcttttgacatcgaagctaacggtaaagtgtacgtagaaaaaggccgccgtatcactgcgcgccacattcgccagctggaaaaagacgacgtcaaactgatcgaagtcccggttgagtacatcgcaggtaaagtggttgctaaagactatattgatgagtctaccggcgagctgatctgcgcagcgaacatggagctgagcctggatctgctggctaagctgagccagtctggtcacaagcgtatcgaaacgctgttcaccaacgatctggatcacggcccatatatctctgaaaccttacgtgtcgacccaactaacgaccgtctgagcgcactggtagaaatctaccgcatgatgcgccctggcgagccgccgactcgtgaagcagctgaaagcctgttcgagaacctgttcttctccgaagaccgttatgacttgtctgcggttggtcgtatgaagttcaaccgttctctgctgcgcgaagaaatcgaaggttccggtatcctgagcaaagacgacatcattgatgttatgaaaaagctcatcgatatccgtaacggtaaaggcgaagtcgatgatatcgaccacctcggcaaccgtcgtatccgttccgttggcgaaatggcggaaaaccagttccgcgttggcctggtacgtgtagagcgtgcggtgaaagagcgtctgtctctgggcgatctggataccctgatgccacaggatatgatcaacgccaagccgatttccgcagcagtgaaagagttcttcggttccagccagctgtctcagtttatggaccagaacaacccgctgtctgagattacgcacaaacgtcgtatctccgcactcggcccaggcggtctgacccgtgaacgtgcaggcttcgaagttcgagacgtacacccgactcactacggtcgcgtatgtccaatcgaaacccctgaaggtccgaacatcggtctgatcaactctctgtccgtgtacgcacagactaacgaatacggcttccttgagactccgtatcgtaaagtgaccgacggtgttgtaactgacgaaattcactacctgtctgctatcgaagaaggcaactacgttatcgcccaggcgaactccaacttggatgaagaaggccacttcgtagaagacctggtaacttgccgtagcaaaggcgaatccagcttgttcagccgcgaccaggttgactacatggacgtatccacccagcaggtggtatccgtcggtgcgtccctgatcccgttcctggaacacgatgacgccaaccgtgcattgatgggtgcgaacatgcaacgtcaggccgttccgactctgcgcgctgataagccgctggttggtactggtatggaacgtgctgttgccgttgactccggtgtaactgcggtagctaaacgtggtggtgtcgttcagtacgtggatgcttcccgtatcgttatcaaagttaacgaagacgagatgtatccgggtgaagcaggtatcgacatctacaacctgaccaaatacacccgttctaaccagaacacctgtatcaaccagatgccgtgtgtgtctctgggtgaaccggttgaacgtggcgacgtgctggcagacggtccgtccaccgacctcggtgaactggcgcttggtcagaacatgcgcgtagcgttcatgccgtggaatggttacaacttcgaagactccatcctcgtatccgagcgtgttgttcaggaagaccgtttcaccaccatccacattcaggaactggcgtgtgtgtcccgtgacaccaagctgggtccggaagagatcaccgctgacatcccgaacgtgggtgaagctgcgctctccaaactggatgaatccggtatcgtttacattggtgcggaagtgaccggtggcgacattctggttggtaaggtaacgccgaaaggtgaaactcagctgaccccagaagaaaaactgctgcgtgcgatcttcggtgagaaagcctctgacgttaaagactcttctctgcgcgtaccaaacggtgtatccggtacggttatcgacgttcaggtctttactcgcgatggcgtagaaaaagacaaacgtgcgctggaaatcgaagaaatgcagctcaaacaggcgaagaaagacctgtctgaagaactgcagatcctcgaagcgggtctgttcagccgtatccgtgctgtgctggtagccggtggcgttgaagctgagaagctcgacaaactgccgcgcgatcgctggctggagctgggcctgacagacgaagagaaacaaaatcagctggaacagctggctgagcagtatgacgaactgaaacacgagttcgagaagaaactcgaagcgaaacgccgcaaaatcacccagggcgacgatctggcaccgggcgtgctgaagattgttaaggtatatctggcggttaaacgccgtatccagcctggtgacaagatggcaggtcgtcacggtaacaagggtgtaatttctaagatcaacccgatcgaagatatgccttacgatgaaaacggtacgccggtagacatcgtactgaacccgctgggcgtaccgtctcgtatgaacatcggtcagatcctcgaaacccacctgggtatggctgcgaaaggtatcggcgacaagatcaacgccatgctgaaacagcagcaagaagtcgcgaaactgcgcgaattcatccagcgtgcgtacgatctgggcgctgacgttcgtcagaaagttgacctgagtaccttcagcgatgaagaagttatgcgtctggctgaaaacctgcgcaaaggtatgccaatcgcaacgccggtgttcgacggtgcgaaagaagcagaaattaaagagctgctgaaacttggcgacctgccgacttccggtcagatccgcctgtacgatggtcgcactggtgaacagttcgagcgtccggtaaccgttggttacatgtacatgctgaaactgaaccacctggtcgacgacaagatgcacgcgcgttccaccggttcttacagcctggttactcagcagccgctgggtggtaaggcacagttcggtggtcagcgtttcggggagatggaagtgtgggcgctggaagcatacggcgcagcatacaccctgcaggaaatgctcaccgttaagtctgatgacgtgaacggtcgtaccaagatgtataaaaacatcgtggacggcaaccatcagatggagccgggcatgccagaatccttcaacgtattgttgaaagagattcgtagcctgggtatcaacatcgaactggaagacgagtaattctcgctcaaacaggtcactgctgtcgggttaaaacccggcagcggattgtgctaactccgacgggagcaaatccgtgaaagatttattaaagtttctgaaagcgcagactaaaaccgaagagtttgatgcgatcaaaattgctctggctagcccagacatgatccgtagttggtctttcggtgaagttaaaaagccggaaaccatcaactaccgtacgttcaaaccagaacgtgacggccttttctgcgcccgtatctttgggccggtaaaagattacgagtgcctgtgcggtaagtacaagcgcctgaaacaccgtggcgtcatctgtgagaagtgcggcgttgaagtgacccagactaaagtacgccgtgagcgtatgggccacatcgaactggcttccccgactgcgcacatctggttcctgaaaagcctgccgtcccgtatcggtctgctgctcgatatgccgctgcgcgatatcgaacgcgtactgtactttgaatcctatgtggttatcgaaggcggtatgaccaacctggaacgtcagcagatcctgactgaagagcagtatctggacgcgctggaagagttcggtgacgaattcgacgcgaagatgggggcggaagcaatccaggctctgctgaagagcatggatctggagcaagagtgcgaacagctgcgtgaagagctgaacgaaaccaactccgaaaccaagcgtaaaaagctgaccaagcgtatcaaactgctggaagcgttcgttcagtctggtaacaaaccagagtggatgatcctgaccgttctgccggtactgccgccagatctgcgtccgctggttccgctggatggtggtcgtttcgcgacttctgacctgaacgatctgtatcgtcgcgtcattaaccgtaacaaccgtctgaaacgtctgctggatctggctgcgccggacatcatcgtacgtaacgaaaaacgtatgctgcaggaagcggtagacgccctgctggataacggtcgtcgcggtcgtgcgatcaccggttctaacaagcgtcctctgaaatctttggccgacatgatcaaaggtaaacagggtcgtttccgtcagaacctgctcggtaagcgtgttgactactccggtcgttctgtaatcaccgtaggtccatacctgcgtctgcatcagtgcggtctgccgaagaaaatggcactggagctgttcaaaccgttcatctacggcaagctggaactgcgtggtcttgctaccaccattaaagctgcgaagaaaatggttgagcgcgaagaagctgtcgtttgggatatcctggacgaagttatccgcgaacacccggtactgctgaaccgtgcaccgactctgcaccgtctgggtatccaggcatttgaaccggtactgatcgaaggtaaagctatccagctgcacccgctggtttgtgcggcatataacgccgacttcgatggtgaccagatggctgttcacgtaccgctgacgctggaagcccagctggaagcgcgtgcgctgatgatgtctaccaacaacatcctgtccccggcgaacggcgaaccaatcatcgttccgtctcaggacgttgtactgggtctgtactacatgacccgtgactgtgttaacgccaaaggcgaaggcatggtgctgactggcccgaaagaagcagaacgtctgtatcgctctggtctggcttctctgcatgcgcgcgttaaagtgcgtatcaccgagtatgaaaaagatgctaacggtgaattagtagcgaaaaccagcctgaaagacacgactgttggccgtgccattctgtggatgattgtaccgaaaggtctgccttactccatcgtcaaccaggcgctgggtaaaaaagcaatctccaaaatgctgaacacctgctaccgcattctcggtctgaaaccgaccgttatttttgcggaccagatcatgtacaccggcttcgcctatgcagcgcgttctggtgcatctgttggtatcgatgacatggtcatcccggagaagaaacacgaaatcatctccgaggcagaagcagaagttgctgaaattcaggagcagttccagtctggtctggtaactgcgggcgaacgctacaacaaagttatcgatatctgggctgcggcgaacgatcgtgtatccaaagcgatgatggataacctgcaaactgaaaccgtgattaaccgtgacggtcaggaagagaagcaggtttccttcaacagcatctacatgatggccgactccggtgcgcgtggttctgcggcacagattcgtcagcttgctggtatgcgtggtctgatggcgaagccggatggctccatcatcgaaacgccaatcaccgcgaacttccgtgaaggtctgaacgtactccagtacttcatctccacccacggtgctcgtaaaggtctggcggataccgcactgaaaactgcgaactccggttacctgactcgtcgtctggttgacgtggcgcaggacctggtggttaccgaagacgattgtggtacccatgaaggtatcatgatgactccggttatcgagggtggtgacgttaaagagccgctgcgcgatcgcgtactgggtcgtgtaactgctgaagacgttctgaagccgggtactgctgatatcctcgttccgcgcaacacgctgctgcacgaacagtggtgtgacctgctggaagagaactctgtcgacgcggttaaagtacgttctgttgtatcttgtgacaccgactttggtgtatgtgcgcactgctacggtcgtgacctggcgcgtggccacatcatcaacaagggtgaagcaatcggtgttatcgcggcacagtccatcggtgaaccgggtacacagctgaccatgcgtacgttccacatcggtggtgcggcatctcgtgcggctgctgaatccagcatccaagtgaaaaacaaaggtagcatcaagctcagcaacgtgaagagcgttgtgaactccagcggtaaactggttatcacttcccgtaatactgaactgaaactgatcgacgaattcggtcgtactaaagaaagctacaaagtaccttacggtgcggtactggcgaaaggcgatggcgaacaggttgctggcggcgaaaccgttgcaaactgggacccgcacaccatgccggttatcaccgaagtaagcggttttgtacgctttactgacatgatcgacggccagaccattacgcgtcagaccgacgaactgaccggtctgtctagcctggtggttctggattccgcagaacgtaccgcaggtggtaaagatctgcgtccggcactgaaaatcgttgatgctcagggtaacgacgttctgatcccaggtaccgatatgccagcgcagtacttcctgccgggtaaagcgattgttcagctggaagatggcgtacagatcagctctggtgacaccctggcgcgtattccgcaggaatccggcggtaccaaggacatcaccggtggtctgccgcgcgttgcggacctgttcgaagcacgtcgtccgaaagagccggcaatcctggctgaaatcagcggtatcgtttccttcggtaaagaaaccaaaggtaaacgtcgtctggttatcaccccggtagacggtagcgatccgtacgaagagatgattccgaaatggcgtcagctcaacgtgttcgaaggtgaacgtgtagaacgtggtgacgtaatttccgacggtccggaagcgccgcacgacattctgcgtctgcgtggtgttcatgctgttactcgttacatcgttaacgaagtacaggacgtataccgtctgcagggcgttaagattaacgataaacacatcgaagttatcgttcgtcagatgctgcgtaaagctaccatcgttaacgcgggtagctccgacttcctggaaggcgaacaggttgaatactctcgcgtcaagatcgcaaaccgcgaactggaagcgaacggcaaagtgggtgcaacttactcccgcgatctgctgggtatcaccaaagcgtctctggcaaccgagtccttcatctccgcggcaagcttccaggagaccactcgcgtgctgaccgaagcagccgttgcgggcaaacgcgacgaactgcgcggcctgaaagagaacgttatcgtgggtcgtctgatcccggcaggtaccggttacgcgtaccaccaggatcgtatgcgtcgccgtgctgcgggtgaagctccggctgcaccgcaggtgactgcagaagacgcatctgccagcctggcagaactgctgaacgcaggtctgggcggttctgataacgagtaatcgttaatccgcaaataacgtaaaaacccgcttcggcgggtttttttatggggggagtttagggaaagagcatttgtcagaatatttaaggaatttctgaatactcataatcaatgtagagatgactaatatcctgaaactgactgaactaattgagtcaaactcggcaaggattcgatactattcctgtgtaactttcttaaggaacgagaatgaaacaggaagtggaaaagtggcgaccttttggacatccggatggtgatattcgtgatttaagttttcttgatgctcatcaggctgtctacgttcagcatcatgagggcaaagagcctttagagtatcgcttttgggttacctactctcttcactgcttcacaaaagattatgaacatcagacgaacgaagaaaaacaaagcttaatgtaccacgcgcctaaagaatctcgtcccttctgccagcaccgttataacttagcgcgcacacacttaaaaagaactattttggcgctgccagaaagcaacgttattcatgccgggtatggtagctatgccgtgattgaggtggacttagacggaggagataaggcattttactttgttgcgttcagggctttcagggaaaagaaaaaactccgtttgcatgtaactagcgcttatcccatttctgaaaaacagaaaggtaaaagtgtgaaatttttcaccattgcctacaacttattgagaaataagcagcttcctcagcccagtaaataacaaaacccaccttaaggtgggtttcgccagagaattatctctggtattcagaacgccattaccggactttgccttgaccttgcgataatcgcaggttgcgggatgtctgaatttcttcagtctgctgcatcctggaagatgagaacatgtgttcttattttcgtctctatcatagttgagtatttactctcttacaatcagatctctttcattgctcaacaggcgatggcttcagactttgcattacggaatttttaagaaaggcagggcgaaacgaggaagaagcttttcgccctggacaacattcctgctgacggcactaccataaaaaaacacaacgctttcaacaaccttgcgtttttcatcttccgtagcggctcggaataaatttacgttcttacattccgtctcatagtctttggctggcgcgtcccagatagctgtcccagtctttccataccggctgcaaaccctgagcggttaacgcggcagcaaccgcttccggtctgcgatcgtcgtgcggactgaactgttccaactcggggtgattatcggcatagccacctggctgcgttttgctgaaggcgctgacgttattgatcgccagcggaataacgcgatcgcgaaaccacggactttcccgcgtggagagactcagttcaatctccggtgcaagcagtcggaaggcgcagatggtttgcactaactggcgttcatccataatgctcgcaggctcaatgccgccagtacacgggcgcaggcgcggaaaggagacagagtaacggctttgccagtaatgctgttgcagccatagcaaatgttcggcaaccatatagctgtcaacgcgccagttgtcggaaaggccaattagcgcgccgaggcctatcttatcaatccccgcacgccccagccgatccggcgtttccagccgccagaagaagtcctgttttttgcctttcagatgatggcgggcataagtcgcctcgtgatatgtctcctgataaaccatcacgccatccagaccaagttgctttaactcggcgtattccgtctccgccagcggttgcacttccatctgtagactagagaactgttcacgaagggcagggagatgacgacgaaagtaatccatccccactttcgcctgatgttcaccagtgactaacagcagatgttcaaagcccatctcccgtatagcggcactttccctggcaatatccgcttcatccagcgttttgcgcttgatgcgattactcatggaaaatccacagtacgtgcagtcgttagcgcaaagattggaaagataaagcgggacgtagaaactaactgtgttgccaaatcgctgacgggtcagacgctgcgcccgttgggccagttgttccagatagccactggcggcagggcttaacagcgccatcatgtcgtcgcgggtgagttggctggcatttagcgcccgctctacgtcagcagccgttttgccgttgatacgcaggcggatgtcgtcccagtccagttgtcgccagcgatcgctgaaggttttcatgcgcttgcctccagaaatccggtcagcgggctggtggcatgagcaaaataactgcggctgcccggtccggactgacgtgccagtaggcctgcttctaccgccagacgaaatgccttcgccatgttgacgggatcgtccgcgacggcaatcgccgtattcactaacaccgcgtcggcccccatttccagcgcctgcgcggcatggctgggaacgccgatgccagcatcgacaaccaccggcactgtggcctgctggataataatctccagcatggcgcgggtttccagtccctgattgctgccaatcggcgcgccgagcggcatcaccgctgcacagccgacttcttccagacgtttacacaataccggatcggccccgcagtaaggcagcacgacaaatccctgttgtaccagcgtttcggcggctttcagggtttcgatgggatcgggcaacagccagcgggcgtcagggtgaatctctaattttaaccagtttgtgcctaacgcttcacgagccagatgggcggcgaaaatggcttcttccgctgttttcgccccggatgtatttggcagcagggtcacacccgccgcgataagcggttcgaggatagcgtcgttgtgctggcgcaagtcgacacgtttcatcgccagtgtcaccagctggctgccggaagcgcggatcgcctccaccatcagttgactagaagcgaatttccctgtgccggtaaacagatgactatcaaacgttttgtccgcaatacgtaacatttcaaccccctgcaataacctgaaaaagcaggatctggtcgccatcctgcacgatatgttgcgcccactgctcacgcgggacgatttgctgattaatcgccagagccgcgcccgcttgtcgttggtcgagttgctccagtagttcgtgaacagtttgcccggcggcgcactgcatcgcttgatcgttaaacaggatctgcattgcttcctccgcataccgggcaaccactggcgcggcgcaacgccaggctgcgccactggctgcttttaccgtcgaacagtcggagttctcccgcaggtgtctctataccgcttaataacttaatggcttccagtgcctgcaaagtgcccataaccccgaccaccgggccaaccacgcccgccgtgcggcagttgcgttctggctcctggttatctggccacaggcagcggtaacacccctgctcccagggcggcgtcagtaccatcaactgaccgccaaatccgaccgcgctggcggtgataagcggcgtgttgagtgccacgcaggcggcattaatctcctggcgagtcgccatattgtcggtacagtcgagcaccacatcggcccgtgcaaccgcatcttttaacgcctcacccgttaaccgttgttgtaatgctgtcagttgaatgtcgggattcaactgtgtcagtcgctgttggctgacctggcttttcgggcgatcgatatcttcagtggtaaagaggatttgtcgttgcagattgcttaaatgcacatcgtcgtcatctgccagtaccagcgtcccgacgccagcgcccgccaggtacagcgcagcaggtgtacccagcccgcccagaccgataatcagcacctggctgtcgagcagtttttgctgcccgtccagagcgatatcgtcgagcaggatttggcggctataacgcataaagtcacggtcattcatcgccaactcctgcaatttccagcaactgtgccgttgccaaacgccagtctgcggcttgagtaatggcgctgacgacggcgatactgccgacacccgttgctatcaccgcaggcgcgcgtgccagactgataccgccaatcgccacggtgggataatccgccagtcgctcaacatgccgtgccagctgttccagcccctgcggtgcagaaggcatctgtttggtttgcgtcgggaacacatgtcccagcgcgatataagaggggcgtgctgccagcgcgacgtcgatttccatatcgtcatgtgtgctaacgcccagccgcaggcctgccgcgcggatggcattgagatcggtggcttgcaaatcttcctgccccaaatggacgccatacgcctgatgcttgatcgccagccgccagtaatcgttgataaacaatcgcgcgttatagcggcggcccagcgcaattgccgccacgacatcggcttccacctcttcatcgcgccgatctttgatgcgtagctggagagtacgtacgcctgcatccaacagacgttcgatccactgtacgctgtccaccaccgggtacagtccactacgaaaaggtacaggaggaaaatcaggctgatacatcacgcttcctccttacgcaggtagatttctccgcctctggcacggaagttctcgctcatatccgccattcccatttcaatagtttgcgtggcggcgtaatcacgcacttcctggctgattttcatgctgcagaatttcggcccacacatggagcaaaaatgggcgactttaccactctcttgcggcagggtttcatcgtgataagcgcgggcggtaaacgggtcgagggccagattaaactggtcttcccagcgaaattcgaagcgggctttgctcatggcgttatcgcgaatttgcgcgcccggatgccctttcgccaggtcagcggcgtgggcagcaatcttataggtgataagcccctgcttaacatcttctttattgggcagacccagatgctcttttggcgttacgtaacagagcatcgcgcagccaaaccagccaatcatcgccgcaccaatcccgctcgtgaagtggtcatagcccggcgcaatatcggtagttagcggccccagagtgtaaaacggcgcttcgtggcagtgctctaactcctcggtcatattgcggcggatcatctgcatcggcacgtggcctgggccttcaatcatcacctgcacgtcatattcccaggcaattttggtcagttcgcccagcgtatgcagctcggcaaactgcgcttcatcgttggcgtcctgaatagaaccggggcgcagaccgtcgcccaggctcaggctaacgtcataagcggcacagatttcacaaatttcgcggaagtgttgatagaggaaattttcctgatgatgggagaggcaccatttcgccataatgctaccgccgcgagagacgataccggtcaggcgtttcgcggtcatcggcacatagcgcagcagtacgcccgcatggatagtgaagtaatccacaccttgctcggcctgttccagcagcgtgtcgcggaacgcttcccaggtaagatcttcggcgatcccgttaaccttctccagcgcctggtagatcggcactgtaccgatcggcaccgggctgttacgcaaaatccactcgcgggtttcgtgaatatagcgaccggtggagagatccatcaccgtatccgctccccagcgcgtggaccataccagcttttccacttcttcttcgatggaagaggtgaccgcgctgttgccgatattggcgttaacttttaccaggaaattgcgaccaataatcatcggctcgctttccggatgattaatgttggccgggataatcgcacgtccggcagcaacttcatcacggacaaattccgcagtgatattttccggcagatgtgcgccaaagctcattcccggatgctggtggcgtaaaacctcgctacggatgcgctcgcggcccatattctcgcggatggcgatgaattccatttccggcgtgatgatgccctggcgggcgtagtgcagttgggtgacacggcgtcctgctttggcgcgttttggtgttagtacgccgctaaaacgcagttcgtcgaggccatcatctgccagccgcgctttagtgtaatcggaactgcgcacggtaagttcttcggtatcgccgcgcgcatcgatccacggctggcgtagttttgccagcccttgctgcacgttaatggcaatctgcggatcaccatacgggccggaggtgtcgtagaccggaatcgcttcgttttcttcgtactgcggctgttctttgctaccgccaattagcgtcgggctaagctggatctcacgcatcggcacgcgcacgccggggtgtgtgccagtgatataaatgcgtttactgttgggaaaggcggtgccttccagggtgtcgataaaatgttgggcccgggcgcgttgttcgcggcgggtcagttttgttgcagacatagctcattccaaaaagttaaggacgtggcttgtcagacgacggatgaagcaagagacgatcgccgcaggggcgatgcgatagcagattaactcttgttcccttcgcaggtattagcctgatcaggttccgcggatcccgaataaacggtctcagccagttaaggcactccgacaagaaattagccccgcaaatggggcattgaatgtaaattacgcgttaacagcgcagaactcaagcaggatgtttgacgcgggcggcgtcaagcaccagcagaatcagcttatcttccagcacaaagcgcgcttccagcgcctcgccgatgtcagataaaacctgttgaaactcaaggtaattatcatgatcgatggcggtttccagactggaatcgtagtaatccataatctgttgagtattggcttcgagttgcggccaaatcttcgcggcgcgcgcgagttgcccgttgccttccagcttatgaagaatgcgctcataaatactgaaatgtccggcagacaagtaatcgaccaggctctgacaaaaatcatcaagggctttttcgtttagcctcatgtagctttctttgccaggcttaatgccaaccagattgtagtaagccacgagcagatgcttacgtacatgtagccagcgatcaaccagtttgttacttcctctgacgcgctccgtcaggttatcgagctggttaagcatgattgactccgcaagtttgtattcaaaaactgctcagtgagaaatgtaaaaaccatgttaaacatgccagtgatgcaaaggtagtgcaagagctatggatcgtataattgaaaaattagatcacggctggtgggtcgtcagccatgaacaaaaattatggttgccgaagggagaattgccatatggcgaagcggcaaatttcgatcttgtgggtcagcgcgcactacaaatcggcgaatggcagggggaacctgtttggttagtacaacagcagcggcgtcacgatatggggagcgtacgtcaggtcattgatctcgatgttgggctgtttcaactggccggacgaggcgtacaactggcggagttttaccgaagtcataaatactgtggttactgcgggcatgaaatgtatccgagcaaaaccgaatgggcgatgctgtgcagccattgccgtgagcgttactacccgcaaatcgccccctgcattattgttgccatccgtcgcgatgatagcatcctcctcgcccagcatacccgccatcgtaacggtgtccatacagtacttgccggattcgtcgaagtgggcgaaaccctcgagcaggcagtcgcgcgggaagtgatggaagagagcggaattaaagttaaaaacttgcgttacgtgacttctcagccgtggccgtttcctcagtctttaatgaccgcgtttatggcggaatatgacagcggcgacatcgtgatcgacccgaaagaattgctcgaggcgaactggtatcgctatgacgatttgccgttactcccgccgcccggcaccgtagcgcgccgtctgatagaagatacggtggcgatgtgtcgggcagagtatgagtgatgatacactgaccgcctgacgcactaaggaacagccaaaatgaccgaacttaaaaacgatcgttatctgcgggcgctgctgcgccagcccgttgatgtcactccagtatggatgatgcgccaggcgggtcgctatctaccggaatataaagccacgcgcgcccaggcaggcgattttatgagcctgtgcaaaaacgccgagctggcgtgcgaagtgactttgcaaccgctgcgtcgctacccgctggatgcggcgatcctcttttccgatatcctcaccgtgccggacgcgatggggttagggctctattttgaagccggagaaggtccgcgttttaccagcccagtcacctgcaaagctgacgtcgataaactgccaattccggacccggaagatgaactgggttacgtgatgaacgcggtgcgtaccattcgtcgcgaactgaaaggcgaagtgccgctgattggtttttccggcagcccgtggacgctggcgacctacatggtggaaggcggcagcagcaaagccttcaccgtgatcaaaaaaatgatgtatgccgatccgcaggcgctgcacgctctgctcgataaactggcgaaaagcgtcactttgtatctgaatgcgcagattaaagccggtgctcaggcagtgatgattttcgacacctggggcggcgtgcttaccgggcgcgattatcaacagttcagcctctattacatgcataaaattgttgatggtttactgcgtgaaaacgacggtcgccgcgtaccggtcacgctgtttaccaaaggcggcggacagtggctggaagccatggcagaaaccggttgcgatgcgctgggcctcgactggacaacggacatcgccgatgcgcgccgccgtgtgggcaataaagtcgcgttgcagggtaatatggatccgagcatgctgtacgcgccgcctgcccgcattgaagaagaagtagcgactatacttgcaggtttcggtcacggcgaaggtcatgtctttaaccttggtcacggcattcatcaggatgtgccgccagaacatgctggcgtgttcgtggaggcagtgcatcgactgtctgaacagtatcaccgctaaggagtgattatggatctcgcgagtttacgcgctcaacaaatcgaactggcttcttctgtgatccgcgaggatcgactcgataaagatccaccggatctgatcgccggagccgatgtcgggtttgagcagggcggagaagtgacgcgagcggcgatggtgctgctgaaatatcccagccttgagctggtcgagtataaagttgcccgcatcgccaccaccatgccttacattccaggttttctttccttccgcgaatatcctgcgctgctggcagcgtgggagatgctgagccaaaagccggatttagtgtttgtcgatggtcatgggatcagccatcctcgccgtcttggcgtcgccagccattttggcttattggtggatgtgccgaccattggcgtggcgaaaaaacggctctgcggtaaattcgaaccgctctccagcgaaccgggcgcgctggccccactgatggataaaggcgagcagctggcctgggtctggcgcagcaaagcgcgctgtaacccgttgtttatcgctaccggccatcgggtcagcgtggacagcgcgctggcgtgggtacaacgctgcatgaaaggctatcgtctgccggagccaacgcgctgggcggacgcggtggccagcgaacgtccggcgttcgtgcgctatacagcaaatcagccctaattcaggtaaactgcggataatttccgtatttgagaactcaacatgttacaaaacccaattcatctgcgtctggagcgcctggaaagctggcagcatgtcactttcatggcttgcttatgcgaacgcatgtaccccaattacgccatgttctgccagcaaaccggttttggtgatgggcaaatttaccgtcgcattctcgatctcatctgggaaacgctgaccgttaaagacgcaaaagtaaatttcgacagccaactggagaaatttgaagaagcgattcctagtgccgacgatttcgatctgtacggcgtttatccggcaatcgatgcctgcgtggcgttaagtgaactggtccatagccgtttgagtggtgaaacgctcgaacacgcggtggaagtgagtaagacctccatcacgaccgttgcgatgctggaaatgactcaggctggtcgcgaaatgagcgatgaagagcttaaagaaaacccagctgtagagcaagaatgggacattcagtgggaaatattccgacttttagctgagtgcgaagaacgcgatatcgagctgataaaaggccttagggcagacctgcgtgaggcgggtgagagcaatattggtataatttttcagcaataagaccagaaaacgtgatttaacgcctgatttgtcgtacctggagtcttccctttcgcccccgtctggtctacatttggggggcgaaaaaaagtggctatcggtgcgtgtatgcaggagagtgctattctggcatttccgtcgcactcgatgcttagcaagcgataaacacattgtaaggataacttatgaacaagactcaactgattgatgtaattgcagagaaagcagaactgtccaaaacccaggctaaagctgctctggagtccactctggctgcaattactgagtctctgaaagaaggcgatgctgtacaactggttggtttcggtaccttcaaagtgaaccaccgcgctgagcgtactggccgcaacccgcagaccggtaaagaaatcaaaattgccgcagctaacgtaccggcatttgtttctggcaaggcactgaaagacgcagttaagtaagattgcgtggcagtgaacagttttaacgaaggggtggttagtccccttttgtctttctggcgtcgaagtttgatgctggctggcgctctgcttctcactgcctgtagtcataactctagtcttcctccctttaccgccagtggatttgctgaagaccagggcgcggtacgcatctggcgaaaagacagcggcgataatgtgcatctgcttgccgtgtttagcccgtggcgcagtggcgataccacgacgcgagagtatcgctggcagggcgataacctcacgctcatcaatatcaatgtttacagcaaaccgccggtgaatattcgcgcgcgttttgacgatcgcggtgatctgagctttatgcaacgtgaatccgatggggaaaagcagcagctttctaacgaccaaatcgatttataccgttatcgtgctgatcagatccgccagattagcgatgccttacgtcaggggagagtcgtgctgcgccaggggcgctggcatgcgatggaacagaccgtgaccacctgcgaagggcaaaccattaaacctgatttagatagccaggcgatagcgcatatcgagcgccgccagagccgctcttctgttgatgtcagcgtggcatggctggaagcgcccgaaggtagccaattactgttagtggcaaactctgatttctgtcgctggcaacccaacgagaaaacgttctgatttaccagtggcccatacccatatgaccgccaccaccgcagccgccgtagcccatgcccattccggctccgcgcggaatacccgcttcagccatcgcgatatctcgtttcacccgtaactcatctaagctctgacgcaaattctccatctctttggcgaccgcgttaattttgctgctatccggtgggttcgcggctaacagggcattgtattcataacgcttcgtcaccagttgctgttgcagtgcgctgctttgagcgtaaaagtcattatggattttctgccacgctgtctgttgttcgctggtcaaaggcgcggcattttgctgccacataccgtgtccgccgtgagcaaatgcagatgtgcttcccatcgccattgcactaagcgccatcattaccagggcaattttcgtgttccgtttcatggttaatcctccagtggttgtcttacttcgggtattgcatcttccgtgccaacgatgaaacgctgatatgacgggtaatctggcatgataaacgagtaaaaatgactcgcctgctgcgggtagcgagtcatttttactcattgaaacttaagcctttgtgttacagcgcagggtaagcgctgataaaagatggcatgatttctgctgtcagaaagggatgagcaggcaaagaagaagatgcgttttatgcaacgttctaaagactccttagctaaatggttaagcgcgatcctccccgtggtcattgttgggctggtgggattgtttgcggtaactgtgattcgtgattatgggcgggcaagcgaggcagaccgccaggcattactggaaaaaggtaatgtgcttatccgcgctctggagagcggaagccgcgtagggatggggatgcgaatgcaccatgtacagcaacaggcgcttctggaagagatggcgggacagccgggagtgttgtggttcgcagtcaccgatgcgcagggcatcattattcttcatagcgaccccgataaggtcgggcgtgcgctctatagcccggatgaaatgcagaaattaaagccagaggaaaactcccgctggcggctgcttgggaaaacggaaactacgcctgcacttgaggtctatcgtttgttccagccaatgagtgcgccctggcggcatggaatgcacaatatgccgcgctgtaacggcaaagctgtgccacaagtagatgcacaacaggctatttttatcgccgttgatgccagtgatctggttgcaacccagagtggggaaaagcgcaataccctgattatcctcttcgccctggcgacggtcttgctggcaagcgtattgagtttcttctggtatcgccgctatctgcgcagccgccagcttctacaagatgaaatgaagcgcaaagagaagctggtggcgctggggcatcttgcggcaggcgttgcccacgaaatccgtaacccactttccagcattaaaggactggcgaaatactttgccgagcgcgcgcctgcagggggagaagcgcatcaactggcgcaggtgatggcgaaagaggccgaccgtttaaaccgcgtggtaagcgagttgctggaactggttaagccaacgcatctggctttgcaggcggtggatctcaacacgctgattaaccacagtttacagctggtaagtcaggatgcaaacagccgggagatccagttacgctttaccgccaacgacacattaccggaaattcaggccgacccggacaggctgactcaggtcctgttgaatctctatctcaatgctattcaggcgattggtcagcatggcgtgattagcgtgacggccagcgaaagcggcgcgggcgtgaaaatcagcgttaccgacagcggtaagggaattgcggcagatcagcttgatgccatcttcactccgtacttcaccactaaagccgaaggcaccggattggggctggcggtcgtgcataatattgttgaacaacacggtggtacaattcaggtcgcaagccaggagggaaaaggcagtacgttcaccctctggcttccggtcaatattacgcgtaaggacccacaaggatgacgcacgataatatcgatattctggtggtggatgatgacattagccactgcactattttgcaggctttactgcgcggctggggctataacgtcgcgctggcgaacagcgggcgacaggcgttggagcaggtgcgggaacaggtttttgatcttgtgctttgcgatgtgcgaatggcggagatggacggcatcgccacgctgaaagagatcaaagcgttaaacccggcaattccggtgctgattatgactgcgtactccagcgtcgagacggcggtagaggcactgaaaactggggcgctggattatctcatcaagccgctggatttcgataacctacaggcgacgctggaaaaagcgctcgcgcatacgcacagtattgatgctgaaacacctgcggtgactgccagccagttcggtatggtcggtaaaagcccggcgatgcaacacctgctcagtgaaatcgccctcgtcgcgccaagcgaagccacggtactgatccacggcgattccggcaccggtaaagagctggtcgccagggcgattcacgccagtagcgcacgtagcgaaaaaccgctggtaacgctcaactgtgcggcactcaacgaatccttgctggaatctgaattgttcggtcacgaaaaaggggcgtttactggagccgataaacgccgggaagggcgctttgttgaggcggacggcggcacgctgtttctcgatgaaattggcgatatcagcccgatgatgcaggtgcgtctgctgcgtgcgattcaggagcgcgaagttcagcgtgtcggtagcaaccagattatcagcgttgatgtccggctgattgcggcgacccatcgcgatcttgccgcagaggtgaatgccgggcgttttcgccaggatctctactatcgcctgaatgtggtggcgattgaagtaccaagcctgcggcaacggcgggaagatatccctctgctggctggccattttctgcagcgctttgccgagcgtaatcgcaaggcggtaaaaggttttacgccccaggcgatggatctgttgattcattacgactggccgggaaatattcgtgagctggaaaacgcggtggaacgggcagtggtgctgctgaccggggaatatatttccgaacgcgagctgccgctggcgattgccagtacgccgatcccgctgggacaaagtcaggatattcagccgttggtggaagtggaaaaagaggtgattctggcggcgctggagaaaacgggcggcaacaaaaccgaagccgcccgtcagttagggatcacgcgcaaaacgctattggcaaaactgagccgttaattctgctcgcgttcgatagcgcgccagccgatatctttccggcagaagcagtcgtcccagtggatatcggtcattaaggcataggcgcgtttctgcgcttctgccacggtatgacccagcgcggtgacgcacagtacgcgcccgccgttggtcactacctgctcgtcatccgccagttttgtgcccgcgtggaacactttgccgcctgccacttcttccagcggcaggccgtggatcacgtcaccggtgcggtaatcacccggatatccacccgcagccatcaccacgccgagagaagcgcgttcatcccactcggacgttttctcgtccagtttgctttcacaggccgccaggcagagctcaaccagatcggacttcatgcgcagcataatcggctgggtttccggatcgccaaagcggcagttaaattcaataaccttcggattgccctgtttgtcgatcatcaggcccgcgtagagaaaaccggtgtaggtgttgccttccgccgccatgcctttcacggttggccagataatacgttccatggtgcgctgatgaacgtcatcggttactaccggcgcgggggagtaagcgcccatcccgccggtgtttggtccggtatctttatcgcctacgcgtttgtgatcctggctggtagccatcggcagcacatgctcgccgtccaccatcacgataaagctcgcttcttcgccatcgaggaactcttcgataacgatgcgatgacccgcgtcgccaaaagcgttgcccgccagcatatcgtgaacagccgcttccgcttcttccagcgtcatcgccacgataacgcctttcccggcagccagaccgtccgctttaatgacgattggcgcgcctttctcacgcagatacgccagcgcaggttctacctcggtgaagttctggtattccgccgtagggatcttatggcgggccaggaaatctttggtaaacgctttactgccttccagttgggccgcacctgcggttgggtcgaagattttcagcccggcggcgcggaaggtatcgaccacgcctttcaccagcggcgcttccgggccgacgatggtcagatcaatcttttcgttttgtgcgaaatccaacagcgccgggatatcggtcacgccaatagcaacgttttgcagcgcgggttccagtgcagtgcctgcattacccggagcaacaaaaacagtctcaaccagcgggctctgggccgctttccaggccagcgcgtgctcgcgcccgccgttaccaatcactaatactttcatctattgctccattaatggcggaagtggcgcatgtcggtgaagagcatcgcaataccgtgctcgtcggcggcggcaatcacttcgtcatcacggatagaaccgccaggctggattacgcaggtcacgcccgcagcggcggcggcatcaataccgtcgcggaacgggaagaacgcgtcagaagccatgctggaacctttcacttccaggccttcatcggccgctttaataccggcgatttttgcggagtacacgcggctcatctggcccgcgccaatgccgatagtcatattgtttttggcatagacgatagcgttggatttcacaaacttcgccaccttccagcagaacagcgcatcacgcagttcctgttcgctcggctgacgtttggtcaccacgcgcagttcttccgcaccgaccatccccaggtcacgatcctgaaccagcagaccgccgttcacgcgtttgaaatcgaggcccggaacacgctcgccccactgaccgcaggtcagaacgcgtacgttctgtttggcggcggtgattttcagggcttcttcgctggcggacggcgcaataatcacttcgacaaactgacgagaaatgatggcctgtgcggtttccgcatccagctcgcggttaaaggcaatgatgccgccgaatgcggaggttgggtcggttttgtacgcgcgatcgtaagcatcaagaatggaattgccgatagccacgccgcaagggttggcgtgcttcacaatcacacatgccggctcggcgaactctttcacgcactccagcgccgcatcggtatcggcgatgttgttataagagagggctttaccctgaacctgggttgcggtagcaacggaggcttctttcacattctcttctatatagaaggcagcctgctggtggctgttctcgccgtaacgcatatccagcttcttaatgaagttcaggttcagcgtgcgtgggaagcgaccggcggcttctttgctttcaccgtggtaagccggaaccatgctgccgaagtagttggcaatcatgctgtcgtaggcggcagtgtgttcgaaggctttgatggcgaggtcgaaacgggttgcaagcgtcaggcttccttcgttgtcatccatctctttaataatggcgtcatagtcgctgctcttcaccacgattgcgacatctttatggttcttggcggcggagcgcaccatcgttgggccgccgatatcgatgttctcaaccgcatcttccaggctgcaaccttcacgggccacggtctgggcgaacggatacaggttaacaaccaccatatcgataggctggatctgatgttcttccataatggcatcgtcctggccgcgacggcccagaatgccaccatgtactttcggatgcagggtcttcacgcgtccatccatcatctccgggaaaccggtgtaatcggaaacttcggttaccggcagacctttttctgctaacagacgggcagtgccccctgtagacagcagctccacaccgcgtgcggaaagtgcctgggcgaattcgacgataccggctttgtcagaaacactgagcagagcgcggcggactggacgacgttgttgcatggtaaatcccctggatttgactattacagagagcgttagctgaatttttcgcgaaaaactcagctaacgcccctaacggggcatccttatttttcgcccgcattgtaacgaaaacgtttgcgcaacgctcgcgaatttttctctttcaatggtgatcacaattttgactgtggttaccgtgggcaaaatacagaaattacattgatgattgtggataactctgtgcgtaaaaaggtataaagcgggcttttgctggggaatgcagcagtcagtcatttttctgcaatttttctattgcggcctgcggagaactccctataatgcgcctccatcgacacggcggatgtgaatcacttcacacaaacagccggttcggttgaagagaaaaatcctgaaattcagggttgactctgaaagaggaaagcgtaatatacgccacctcgcgacagtgcgctaaagcgcgtcgcaactgctctttaacaatttatcagacaatctgtgtgggcactcgaagatacggattcttaacgtcgcaagacgaaaaatgaataccaagtctcaagagtgaacacgtaattcattacgaagtttaattctttgagcatcaaacttttaaattgaagagtttgatcatggctcagattgaacgctggcggcaggcctaacacatgcaagtcgaacggtaacaggaagaagcttgcttctttgctgacgagtggcggacgggtgagtaatgtctgggaaactgcctgatggagggggataactactggaaacggtagctaataccgcataacgtcgcaagaccaaagagggggaccttcgggcctcttgccatcggatgtgcccagatgggattagctagtaggtggggtaacggctcacctaggcgacgatccctagctggtctgagaggatgaccagccacactggaactgagacacggtccagactcctacgggaggcagcagtggggaatattgcacaatgggcgcaagcctgatgcagccatgccgcgtgtatgaagaaggccttcgggttgtaaagtactttcagcggggaggaagggagtaaagttaatacctttgctcattgacgttacccgcagaagaagcaccggctaactccgtgccagcagccgcggtaatacggagggtgcaagcgttaatcggaattactgggcgtaaagcgcacgcaggcggtttgttaagtcagatgtgaaatccccgggctcaacctgggaactgcatctgatactggcaagcttgagtctcgtagaggggggtagaattccaggtgtagcggtgaaatgcgtagagatctggaggaataccggtggcgaaggcggccccctggacgaagactgacgctcaggtgcgaaagcgtggggagcaaacaggattagataccctggtagtccacgccgtaaacgatgtcgacttggaggttgtgcccttgaggcgtggcttccggagctaacgcgttaagtcgaccgcctggggagtacggccgcaaggttaaaactcaaatgaattgacgggggcccgcacaagcggtggagcatgtggtttaattcgatgcaacgcgaagaaccttacctggtcttgacatccacggaagttttcagagatgagaatgtgccttcgggaaccgtgagacaggtgctgcatggctgtcgtcagctcgtgttgtgaaatgttgggttaagtcccgcaacgagcgcaacccttatcctttgttgccagcggtccggccgggaactcaaaggagactgccagtgataaactggaggaaggtggggatgacgtcaagtcatcatggcccttacgaccagggctacacacgtgctacaatggcgcatacaaagagaagcgacctcgcgagagcaagcggacctcataaagtgcgtcgtagtccggattggagtctgcaactcgactccatgaagtcggaatcgctagtaatcgtggatcagaatgccacggtgaatacgttcccgggccttgtacacaccgcccgtcacaccatgggagtgggttgcaaaagaagtaggtagcttaaccttcgggagggcgcttaccactttgtgattcatgactggggtgaagtcgtaacaaggtaaccgtaggggaacctgcggttggatcacctccttaccttaaagaagcgttctttgcagtgctcacacagattgtctgatagaaagtgaaaagcaaggcgtcttgcgaagcagactgatacgtccccttcgtctagaggcccaggacaccgccctttcacggcggtaacaggggttcgaatcccctaggggacgccacttgctggtttgtgagtgaaagtcacctgccttaatatctcaaaactcatcttcgggtgatgtttgagatatttgctctttaaaaatctggatcaagctgaaaattgaaacactgaacaacgaaagttgttcgtgagtctctcaaattttcgcaacacgatgatgaatcgtaagaaacatcttcgggttgtgaggttaagcgactaagcgtacacggtggatgccctggcagtcagaggcgatgaaggacgtgctaatctgcgataagcgtcggtaaggtgatatgaaccgttataaccggcgatttccgaatggggaaacccagtgtgtttcgacacactatcattaactgaatccataggttaatgaggcgaaccgggggaactgaaacatctaagtaccccgaggaaaagaaatcaaccgagattcccccagtagcggcgagcgaacggggagcagcccagagcctgaatcagtgtgtgtgttagtggaagcgtctggaaaggcgcgcgatacagggtgacagccccgtacacaaaaatgcacatgctgtgagctcgatgagtagggcgggacacgtggtatcctgtctgaatatggggggaccatcctccaaggctaaatactcctgactgaccgatagtgaaccagtaccgtgagggaaaggcgaaaagaaccccggcgaggggagtgaaaaagaacctgaaaccgtgtacgtacaagcagtgggagcacgcttaggcgtgtgactgcgtaccttttgtataatgggtcagcgacttatattctgtagcaaggttaaccgaataggggagccgaagggaaaccgagtcttaactgggcgttaagttgcagggtatagacccgaaacccggtgatctagccatgggcaggttgaaggttgggtaacactaactggaggaccgaaccgactaatgttgaaaaattagcggatgacttgtggctgggggtgaaaggccaatcaaaccgggagatagctggttctccccgaaagctatttaggtagcgcctcgtgaattcatctccgggggtagagcactgtttcggcaagggggtcatcccgacttaccaacccgatgcaaactgcgaataccggagaatgttatcacgggagacacacggcgggtgctaacgtccgtcgtgaagagggaaacaacccagaccgccagctaaggtcccaaagtcatggttaagtgggaaacgatgtgggaaggcccagacagccaggatgttggcttagaagcagccatcatttaaagaaagcgtaatagctcactggtcgagtcggcctgcgcggaagatgtaacggggctaaaccatgcaccgaagctgcggcagcgacgcttatgcgttgttgggtaggggagcgttctgtaagcctgcgaaggtgtgctgtgaggcatgctggaggtatcagaagtgcgaatgctgacataagtaacgataaagcgggtgaaaagcccgctcgccggaagaccaagggttcctgtccaacgttaatcggggcagggtgagtcgacccctaaggcgaggccgaaaggcgtagtcgatgggaaacaggttaatattcctgtacttggtgttactgcgaaggggggacggagaaggctatgttggccgggcgacggttgtcccggtttaagcgtgtaggctggttttccaggcaaatccggaaaatcaaggctgaggcgtgatgacgaggcactacggtgctgaagcaacaaatgccctgcttccaggaaaagcctctaagcatcaggtaacatcaaatcgtaccccaaaccgacacaggtggtcaggtagagaataccaaggcgcttgagagaactcgggtgaaggaactaggcaaaatggtgccgtaacttcgggagaaggcacgctgatatgtaggtgaggtccctcgcggatggagctgaaatcagtcgaagataccagctggctgcaactgtttattaaaaacacagcactgtgcaaacacgaaagtggacgtatacggtgtgacgcctgcccggtgccggaaggttaattgatggggttagcgcaagcgaagctcttgatcgaagccccggtaaacggcggccgtaactataacggtcctaaggtagcgaaattccttgtcgggtaagttccgacctgcacgaatggcgtaatgatggccaggctgtctccacccgagactcagtgaaattgaactcgctgtgaagatgcagtgtacccgcggcaagacggaaagaccccgtgaacctttactatagcttgacactgaacattgagccttgatgtgtaggataggtgggaggctttgaagtgtggacgccagtctgcatggagccgaccttgaaataccaccctttaatgtttgatgttctaacgttgacccgtaatccgggttgcggacagtgtctggtgggtagtttgactggggcggtctcctcctaaagagtaacggaggagcacgaaggttggctaatcctggtcggacatcaggaggttagtgcaatggcataagccagcttgactgcgagcgtgacggcgcgagcaggtgcgaaagcaggtcatagtgatccggtggttctgaatggaagggccatcgctcaacggataaaaggtactccggggataacaggctgataccgcccaagagttcatatcgacggcggtgtttggcacctcgatgtcggctcatcacatcctggggctgaagtaggtcccaagggtatggctgttcgccatttaaagtggtacgcgagctgggtttagaacgtcgtgagacagttcggtccctatctgccgtgggcgctggagaactgaggggggctgctcctagtacgagaggaccggagtggacgcatcactggtgttcgggttgtcatgccaatggcactgcccggtagctaaatgcggaagagataagtgctgaaagcatctaagcacgaaacttgccccgagatgagttctccctgactccttgagagtcctgaaggaacgttgaagacgacgacgttgataggccgggtgtgtaagcgcagcgatgcgttgagctaaccggtactaatgaaccgtgaggcttaaccttacaacgccgaaggtgttttggcggattgagagaagattttcagcctgatacagattaaatcagaacgcagaagcggtctgataaaacagaatttgcctggcggcagtagcgcggtggtcccacctgaccccatgccgaactcagaagtgaaacgccgtagcgccgatggtagtgtggggtctccccatgcgagagtagggaactgccaggcatcaaattagaaaaaccccggtccataaggccggggttttttgcatatcaattatttgcatgatgaagggaatctcatgagtgttctgtatatccaaattcgtcgtaatcaaattactgttcgcgatcttgaaagcaaacgtgaagtgagtggagacgctgccttcagtaaccagcgcctgttaatcgccaatttctttgttgcagaaaaagttctgcaagatcttgttctgcaactccacccacgtagtacctggcattcttttttgccagcaaaacgtatggatattgttgtgagcgcactggaaatgaatgagggcggtttgagtcaggttgaggaacgcattctccatgaagtggtcgctggggcaacgttaatgaaatatcgccagttccacatccatgcgcaaagtgcggtactcagtgatagtgcggtcatggcaatgcttaagcagaaataatcgtgtcaccattggtgggtactaaacctgaagttcagcccaccgggatgagaaaaaatcgcttacgcccccacatacgccagattcagcaacggatacggtttccccaaatcgtccacctcagagcgtcccgtaaccttaaaacccaccttcttatagaacccaaccgcctgctcattttgctcattaacgttggttgtcagttccggtgccatgctgagcgcatgctccaccagcacccgacctacgccgcagccgcgcacatcaggatcgataaacagcgcatccatatgctgcccacttagcaacataaatccaaccggctgatcccgctcattaaccgcgacccacaacggcgcttccggcaggaaggaacgaactaggtcctccagctcggtccgatactctgcacttagaaaatcgtgagtggcatcgacagaacgacaccaaatcgcaacgagttcctccccttcctcatgccgactgcggcgaatactaataaccattttctctccttttagtcattcttatattctaacgtagtcttttccttgaaactttctcaccttcaacatgcaggctcgacattggcaaattttctggttatcttcagctatctggatgtctaaacgtataagcgtatgtagtgaggtaatcaggttatgccgattcgtgtgccggacgagctacccgccgtcaatttcttgcgtgaagaaaacgtctttgtgatgacaacttctcgtgcgtctggtcaggaaattcgtccacttaaggttctgatccttaacctgatgccgaagaagattgaaactgaaaatcagtttctgcgcctgcttagtaacagtcctttgcaggtcgatattcagctgttgcgcatcgattcccgtgaaagccgcaacacgcccgcagagcatctgaacaacttctactgtaactttgaagatattcaggatcagaactttgacggtttgattgtaactggtgcgccgctgggcctggtggagtttaatgatgtcgcttactggccgcagatcaaacaggtgctggagtggagcaaagatcacgtcaccagcacgctgtttgtctgctgggcggtacaggccgcgctcaatatcctctacggcattcctaagcaaactcgcaccgaaaaactctctggcgtttacgagcatcatattctccatcctcatgcgcttctgacgcgtggctttgatgatagtttcctggcaccgcatagccgctatgctgactttccggcagcgttgattcgtgattacaccgatctggaaattctggcagagacggaagaaggggatgcatatctgtttgccagtaaagataagcgcattgcctttatgacgggccatcccgaatatgatgcgcaaacgctggcgcaggaatttttccgcgatgtggaagccggactagacccggatgtaccgtataactatttcccgcacaatgatccgcaaaatacaccgcgagcgagctggcgtagtcacggtaatttactgtttaccaactggctcaactattacgtctaccagatcacgccatacgatctacggcacatgaatccaacgctggattaatcttctgtgatagtcgatcgttaagcgattcagcaccttacctcaggcaccttcgggtgccttttttatttccgaaacgtacctcagcaggtgaataaattttattcatattgttatcaacaagttatcaagtatttttaattaaaatggaaattgtttttgattttgcattttaaatgagtagtcttagttgtgctgaacgaaaagagcacaacgatccttcgttcacagtggggaagttttcggatccatgacgaggagctgcacgatgactgaacaggcaacaacaaccgatgaactggctttcacaaggccgtatggcgagcaggagaagcaaattcttactgccgaagcggtagaatttctgactgagctggtgacgcattttacgccacaacgcaataaacttctggcagcgcgcattcagcagcagcaagatattgataacggaacgttgcctgattttattagcgaaacagcttccattcgcgatgctgattggaaaattcgcgggattcctgcggacttagaagaccgccgcgtagagataactggcccggtagagcgcaagatggtgatcaacgcgctcaacgccaatgtgaaagtctttatggccgatttcgaagatagtctggcaccagactggaacaaagtgatcgacgggcaaattaacctgcgtgatgcggttaacggcaccatcagttacaccaatgaagcaggcaaaatttaccagctcaagcccaatccagcggttttgatttgtcgggtacgcggtctgcacttgccggaaaaacatgtcacctggcgtggtgaggcaatccccggcagcctgtttgattttgcgctctatttcttccacaactatcaggcactgttggcaaagggcagtggtccctatttctatctgccgaaaacccagtcctggcaggaagcggcctggtggagcgaagtcttcagctatgcagaagatcgctttaatctgccgcgcggcaccatcaaggcgacgttgctgattgaaacgctgcccgccgtgttccagatggatgaaatccttcacgcgctgcgtgaccatattgttggtctgaactgcggtcgttgggattacatcttcagctatatcaaaacgttgaaaaactatcccgatcgcgtcctgccagacagacaggcagtgacgatggataaaccattcctgaatgcttacagtcgcctgttgattaaaacctgccataaacgcggtgcttttgcgatgggcggcatggcggcgtttattccgagcaaagatgaagagcacaataaccaggtgctcaacaaagtaaaagcggataaaagcctggaagccaataacggtcacgatggcacatggatcgctcacccaggccttgcggacacggcaatggcggtattcaacgacattctcggctcccgtaaaaatcagcttgaagtgatgcgcgaacaagacgcgccgattactgccgatcagctgctggcaccttgtgatggtgaacgcaccgaagaaggtatgcgcgccaacattcgcgtggctgtgcagtacatcgaagcgtggatctctggcaacggctgtgtgccgatttatggcctgatggaagatgcggcgacggctgaaatttcccgtaccagcatctggcagtggatccatcatcaaaaaacgttgagcaatggcaaaccggtgaccaaagccttgttccgccagatgctgggcgaagagatgaaagtcattgccagcgaactgggcgaagaacgtttctcccaggggcgttttgacgatgccgcacgcttgatggaacagatcaccacttccgatgagttaattgatttcctgaccctgccaggctaccgcctgttagcgtaaaccaccacataactatggagcatctgcacatgaaaacccgtacacaacaaattgaagaattacagaaagagtggactcaaccgcgttgggaaggcattactcgcccatacagtgcggaagatgtggtgaaattacgcggtagtgtcaatcctgaatgcacgctggcgcaactgggcgcagcgaaaatgtggcgtctgctgcacggtgagagcaaaaaaggctacatcaacagcctcggcgcactgactggcggtcaggcgctgcaacaggcgaaagcgggtattgaagcagtctatctgagcggatggcaggtagcggcggacgctaacctggcggccagcatgtatccggatcagagcctctatccggcaaacagcgtgccagctgtggtggagcggatcaacaacaccttccgtcgtgccgatcagatccaatggtccgcgggcattgagccgggcgatccgcgctatgtcgattacttcctgccgatcgttgccgatgcggaagccggttttggcggtgtcctgaatgcctttgaactgatgaaagcgatgattgaagccggtgcagcggcagttcacttcgaagatcagctggcgagtgtgaagaaatgcggtcacatgggcggcaaagttttagtgccaactcaggaagctattcagaaactggtcgcggcgcgtctggcagctgacgtgacgggcgttccaaccctgctggttgcccgtaccgatgctgatgcggcggatctgatcacctccgattgcgacccgtatgacagcgaatttattaccggcgagcgtaccagtgaaggcttcttccgtactcatgcgggcattgagcaagcgatcagccgtggcctggcgtatgcgccatatgctgacctggtctggtgtgaaacctccacgccggatctggaactggcgcgtcgctttgcacaagctatccacgcgaaatatccgggcaaactgctggcttataactgcagcccgagcttcaactggcagaaaaacctcgacgacaaaactattgccagcttccagcagcagctgagcgatatgggctacaagttccagttcatcaccctggcaggtatccacagcatgtggttcaacatgtttgacctggcaaacgcctatgcccagggcgagggtatgaagcactacgttgagaaagtgcagcagccggaatttgccgccgcgaaagatggctataccttcgtatctcaccagcaggaagtgggtacaggttacttcgataaagtgacgactattattcagggcggcacgtctagtgtcaccgcgctgaccggctccactgaagaaagccagttctaagcaacaacaaccgttgctgactgtaggccggataaggcgttcacgccgcatccggcaatcggtgcacgatgcctgatgcgacgcttgcgcgtcttatcatgcctacagccgttgccgaacgtaggctggataaggcgtttacgccgcatccggcaattctctgctcctgatgagggcgctaaatgccgcgtggcctggaattattgattgctcaaaccattttgcaaggcttcgatgctcagtatggtcgattcctcgaagtgacctccggtgcgcagcagcgtttcgaacaggccgactggcatgctgtccagcaggcgatgaaaaaccgtatccatctttacgatcatcacgttggtctggtcgtggagcaactgcgctgcattactaacgaccaaagtacggacgcggcatttttactacgtgttaaagagcattacacccggctgttgccggattacccgcgcttcgagattgcggagagcttttttaactccgtgtactgtcggttatttgaccaccgcagccttactcccgagcggctttttatctttagctctcagccagagcgccgctttcgtaccattccccgcccgctggcgaaagactttcaccccgatcacggctgggaatctctactgatgcgcgttatcagcgacctaccgctgcgcctgcgctggcagaataaaagccgtgacatccattacattattcgccatctgacggaaacgctggggacagacaacctcgcggaaagtcatttacaggtggcgaacgaactgttttaccgcaataaagccgcctggctggtaggcaaactgatcacaccttccggcacattgccatttttgctgccgatccaccagacggacgacggcgagttatttattgatacctgcctgacgacgaccgccgaagcgagcattgtttttggctttgcgcgttcttattttatggtttatgcgccgctgcccgcagcgctggtcgagtggctacgggaaattctgccaggtaaaaccaccgctgaattgtatatggctatcggctgccagaagcacgccaaaaccgaaagctaccgcgaatatctcgtttatctacagggctgtaatgagcagttcattgaagcgccgggtattcgtggaatggtgatgttggtgtttacgctgccgggctttgatcgggtattcaaagtcatcaaagacaggttcgcgccgcagaaagagatgtctgccgctcacgttcgtgcctgctatcaactggtgaaagagcacgatcgcgtgggccgaatggcggacacccaggagtttgaaaactttgtgctggagaagcggcatatttccccggcattaatggaattactgcttcaggaagcagcggaaaaaatcaccgatctcggcgaacaaattgtgattcgccatctttatattgagcggcggatggtgccgctcaatatctggctggaacaagtggaaggtcagcagttgcgcgacgccattgaagaatacggtaacgctattcgccagcttgccgctgctaacattttccctggcgacatgctgtttaaaaacttcggtgtcacccgtcacgggcgtgtggttttttatgattacgatgaaatttgctacatgacggaagtgaatttccgcgacatcccgccgccgcgctatccggaagacgaacttgccagcgaaccgtggtacagcgtcagcccgggcgatgttttcccggaagagtttcgccactggctatgcgccgacccgcgtattggtccgctgtttgaagagatgcacgccgacctgttccgcgctgattactggcgcgcactacaaaaccgcatacgtgaagggcatgtggaagatgtttatgcgtatcggcgcaggcaaagatttagcgtacggtatggggagatgcttttttgagtaaagcttccatataatttttctccgcaatgtatcgagggttatccgtaaagccaaagctttcagccatcttatttaatgtattaaggattaattcagcaataacccggtgaccaaattcaaaagccaactcaaaggcagagtatttttgtggggctttgtgttgccaaaaatccataatatcttcagcggtaaatccaaacaggcgtgcatggtcagataaagcaagataaaccgtctctacaacattttgttgtttatgctgtatcgcactaaacaaaccgggatattcattagaattatttgccaggaggaggggcttcatattttttttatcgaatttaaacgtattaaacagagtgggtaatgcgttaaaaatagtattaataacgttcatgtgtccgcgctgcatggccataaacaaacccgtgtcgcgcgcaagacttttagcggtcagaagatctacaatatcggaagcactaatgttaatttcctgggctaggctgggcaatgcttcaagaataactttcacgatatcgctatgtccattttgcatcgccagatatagtcctgggcaaccataaaaatcctttgccttcaggagatcgagtacctgttctttagtcaaatgacatgtgcgaattaacaaaggtaacgcgttcaaaacaattttcagcatgtcggcatcaccattcgccataacatggtataaaacatggctggacgttctatttttggcactcaggaatttatacacttgttcgttatctaaatgatgtgttgcggccagtttaggtaaggcgttcagaatgctggttacaacatttttatccttacgacttatcgctaaaaataatccagaaaaaccatttttatcttttgcctccagaatatgcatgagattttttttgctgagtaatccttcatatcctgtttcactcaaactattgaaaatagtctcaacgatatccgcattaccataatttatagccaaatataaacctggcaggttaatactattataggcagtcaacatttctgttctatgtagttctggcattttctggagttgaatcatcagttgcgtaagttggtgattctgaccaattgccattagcaaattcatcgttgcaggacttaatggaggggttatttcatccacagatccttttaacatcaatagctgttctttcggaagtgctggaattattgcaacagattgattaataacatgatcattactccatttcaggaggctataatctacattcataaaatccatcagagaatagtgtttaatattctctttgctttcgctcataattcttattttatcgttagttacattaggatcataaacgctaaccacgtaatgggtacatccttcagttgtgttctttattcttagccggaccgtcaaagcatggttatccaccagtaatatggctgccataacactgatgccattactttccatcttgtcaaaatatgctttcataactagcccgaaatcaccgcaggcagcaacgcaacgcccctcaggacggctggaaaccaacgccaaagtctggtttttgcattttttgttgaagtgcgtgagaaatttttcagcactagagtaatcatcttgatggggtttgtaatcaacattctgataaatatcattaatatattgtgcagcaatgtgtcggcatactatacggttttggggtcgccccggaaaataacattgaccattaagtttaattcttgggaattctttttcttttctatcactttttaggtttaattcttgtttatcaagagtgtcactgcgttgaggtaaaatttccattaggtatttttcaaatattggggcaatggtttgagtaagtgtcgtgttttcgtttttattaattatcgtaatttctttcttatcagcttgtaagacggacgtggaaaatttaatgacaaaatccttgttgctaaagatatgacgaccattttgtctacagttctcactgaagctttttaatagaggcgtcgccagctccttgccagaaaatttatcctcgagttctttataaaacaattcactcagggtttggtgttcatttgtctgggctgtattattaatatttgcagagaaagaactacgaggaatacgagtaatcatttaaatatctcattgtttattgatgtcttgaattttaactatcagaacagtgaaaaaatttaatatgattacaactaaagaaatatcataaatcgctcaatctcataatgcagccgtaaaagtttcggtggaatgagatcttgcgattttgttaataattaagtggtttgatgtttaaaaataatgctgagttaataaaagtgtgtgaagtgtatgacattaagttattttggcgtcaatgcgattaacagacacccttattctattgccactcaggtatgatgggcagaatattgcctctgcccgccagaaaaagtcagcgcattccaccgtacgccagcgtcacttccttcgccgctttaatcaccatcgcgccaaactcggtcacgcggtcatcggtaatacgactaatcggtccggaaatagaaattgcggcaaacggttcacggtgctcatcgaaaatacacgctgcaaggcaacgtagccccagtgcatgttcctcatcgtcaaaactataaccccgtttgcgcgtttgggcgagatcttcttttaaatgcacaggagacaccagcgttgcgtgggtataggcatgtaaccctttgcggtgcagcagcttcgtcacctgttcttcgctcagttgggctaaaaaggctttacccgcaccggaagcgtgcatcggcaatttaccgccgataggcgcggacattcgcatcagatgcgtacactgtacctggtcgataataatcgcttcgtgatcgctttgatcaagcaccgccatattgaccgtttcgccagactcttccattagattgcgcaggatagggtgaacaatcgctaacaaattacggctctggagaaagctgctgccgaccataaaggcatgtgcgccgattgcccaatgtcccagttcgccaacctgacgcacgaaaccctgctgttgcatcgtggttagcaggcggtgggtcgtggaattgggtaacccggcttgttgcgccagttccgtgagtgccacactgccattggattcggcaatccactccagtaatttcaggccacgcgttaaagactgaacctgtccagtcgctggtgcggtggcaacggcgggttttctgccgcgtttcgcgggaatgggtgcgaccatgacagtctcttttttctgtatcgtggaaatcattttcatttttattgttagctaatgcaatagttactgaactgatccgatgagttaatgttgaacaaatctcatgttgcgtggtggtcgcttttaccacagatgcgtttatgccagtatggtttgttgaatttttattaaatctgggttgagcgtgtcgggagcaagtgtgagcagcaaagtggaacaactgcgtgcgcagttaaatgaacgtattctggtgctggacggcggtatgggcaccatgatccagagttatcgactgaacgaagccgattttcgtggtgaacgctttgccgactggccatgcgacctcaaaggcaacaacgacctgctggtactcagtaaaccggaagtgatcgccgctatccacaacgcctactttgaagcgggcgcggatatcatcgaaaccaacaccttcaactccacgaccattgcgatggcggattaccagatggaatccctgagcgcggaaatcaactttgcggcggcgaaactggcgcgagcttgtgctgacgagtggaccgcgcgcacgccagagaaaccgcgctacgttgccggtgttctcggcccgaccaaccgcacggcgtctatttctccggacgtcaacgatccggcatttcgtaatatcacttttgacgggctggtggcggcttatcgagagtccaccaaagcgctggtggaaggtggcgcggatctgatcctgattgaaaccgttttcgacacccttaacgccaaagcggcggtatttgcggtgaaaacggagtttgaagcgctgggcgttgagctgccgattatgatctccggcaccatcaccgacgcctccgggcgcacgctctccgggcagaccaccgaagcattttacaacagtttgcgccacgccgaagctctgacctttggcctgaactgtgcgctggggcccgatgaactgcgccagtacgtgcaggagctgagtcggattgcggaatgctacgtcaccgcgcacccgaacgccgggctacccaacgcctttggtgagtacgatctcgacgccgacacgatggcaaaacagatacgtgaatgggcgcaagcgggttttctcaatatcgtcggcggctgctgtggcaccacgccacaacatattgcagcgatgagtcgtgcagtagaaggattagcgccgcgcaaactgccggaaattcccgtagcctgccgtttgtccggcctggagccgctgaacattggcgaagatagcctgtttgtgaacgtgggtgaacgcaccaacgtcaccggttccgctaagttcaagcgcctgatcaaagaagagaaatacagcgaggcgctggatgtcgcgcgtcaacaggtggaaaacggcgcgcagattatcgatatcaacatggatgaagggatgctcgatgccgaagcggcgatggtgcgttttctcaatctgattgccggtgaaccggatatcgctcgcgtgccgattatgatcgactccagtaaatgggacgtcattgaaaaaggtctgaagtgtatccagggcaaaggcattgttaactctatcagcatgaaagagggcgtcgatgcctttatccatcacgcgaaattgttgcgtcgctacggtgcggcagtggtggtaatggcctttgacgaacagggacaggccgatactcgcgcacggaaaatcgagatttgccgtcgggcgtacaaaatcctcaccgaagaggttggcttcccgccagaagatatcatcttcgacccaaacatcttcgcggtcgcaactggcattgaagagcacaacaactacgcgcaggactttatcggcgcgtgtgaagacatcaaacgcgaactgccgcacgcgctgatttccggcggcgtatctaacgtttctttcagcttccgtggcaacgatccggtgcgcgaagccattcacgcagtgttcctctactacgctattcgcaatggcatggatatggggatcgtcaacgccgggcaactggcgatttacgacgacctacccgctgaactgcgcgacgcggtggaagatgtgattcttaatcgtcgcgacgatggcaccgagcgtttactggagcttgccgagaaatatcgcggcagcaaaaccgacgacaccgccaacgcccagcaggcggagtggcgcagctgggaagtgaataaacgtctggaatacagcctggtcaaaggcattaccgagtttatcgagcaggataccgaagaagcccgccagcaggctacgcgcccgattgaagtgattgaaggcccgttgatggacggcatgaatgtggtcggcgacctgtttggcgaagggaaaatgttcctgccacaggtggtcaaaagcgcgcgcgtcatgaaacaggcggtggcctacctcgaaccgtttattgaagccagcaaagagcagggcaaaaccaacggcaagatggtgatcgccaccgtgaagggcgacgtccacgacatcggtaaaaatatcgttggtgtggtgctgcaatgtaacaactacgaaattgtcgatctcggcgttatggtgcctgcggaaaaaattctccgtaccgctaaagaagtgaatgctgatctgattggccttagcgggcttatcacgccgagcctggacgagatggttaacgtggcgaaagagatggagcgtcagggcttcactattccgttactgattggcggcgcgacgaccagtaaagcgcacacggcggtgaaaatcgagcagaactacagcggcccgacggtgtatgtgcagaatgccagccgtaccgttggtgtggtggcggcgctgctttccgatacccagcgcgatgattttgtcgctcgtacccgcaaggagtacgaaaccgtacgtattcagcacgggcgcaagaaaccgcgcacaccaccggtcacgctggaagcggcgcgcgataacgatttcgcttttgactggcaggcttacacgccgccggtggcgcaccgtctcggcgtgcaggaagtcgaagccagcatcgaaacgctgcgtaattacatcgactggacaccgttctttatgacctggagcctggccgggaagtatccgcgcattctggaagatgaagtggtgggcgttgaggcgcagcggctgtttaaagacgccaacgacatgctggataaattaagcgccgagaaaacgctgaatccgcgtggcgtggtgggcctgttcccggcaaaccgtgtgggcgatgacattgaaatctaccgtgacgaaacgcgtacccatgtgatcaacgtcagccaccatctgcgtcaacagaccgaaaaaacaggcttcgctaactactgtctcgctgacttcgttgcgccgaagctttctggtaaagcagattacatcggcgcatttgccgtgactggcgggctggaagaggacgcactggctgatgcctttgaagcgcagcacgatgattacaacaaaatcatggtgaaagcgcttgccgaccgtttagccgaagcctttgcggagtatctccatgagcgtgtgcgtaaagtctactggggctatgcgccgaacgagaacctcagcaacgaagagctgatccgcgaaaactaccagggcatccgtccggcaccgggctatccggcctgcccggaacatacggaaaaagccaccatctgggagctgctggaagtggaaaaacacactggcatgaaactcacagaatctttcgccatgtggcccggtgcaagcgttagcggttggtacttcagccacccggacagcaagtactacgctgtagcacaaattcagcgcgatcaggttgaagattatgcccgccgtaaaggtatgagcgttaccgaagttgagcgctggctggcaccgaatctggggtatgacgcggactgattcacaaatctgtcacttttccttacaacaaacagggcgctcaatgagtgccctgtctctttattaatatgaaacacttatactggaaacaggctggaataatcttagccggaaaaacgaatgtcaaaaggcacagtaaagatgccagtcagcgtgtttccggtcctttggtcattcaattgcttcaggaacatataacgataaggagaacctgaactcgtgttaacgctgcttcacctgctttctgccgtcgccctgctggtctgggggactcatattgttcgaaccggcgtaatgcgcgtcttcggcgcgcgtttgcgtactgtccttagccggagcgtcgaaaaaaagccgctcgccttttgcgcggggatcggcgttaccgcactggtacagagcagtaatgccaccaccatgctggtgaccagctttgtcgctcaggatctggtagccctcgcaccggctctggtcattgtgctgggtgcagatgtcgggacggcgctaatggcgcgtattctcaccttcgacttatcctggctgagtccgttacttatttttatcggcgtgatttttttcctcggacgcaaacagagtcgcgccgggcaactgggccgcgtcggtattggtcttgggctgattttgctagcgctggagttgattgtgcaggccgtaacgccgatcacccaggcaaacggcgttcaggtgatctttgccagcctgaccggcgatattctgctggatgcgctgattggcgcgatgttcgccattatcagctactccagccttgctgctgtactgctgaccgcgactctgaccgccgcaggcattatctccttccccgtggcgctctgtctggtgattggtgctaacctcggttccggtctgctggcaatgctcaacaacagtgccgccaatgccgcagcccgccgtgtcgcgctgggtagtctgctgtttaagctggtgggtagcctgattatcctgccgtttgtccatttgctggcagagacaatggggaagttgagtttgccaaaagcggaactggtgatctatttccacgtcttctacaaccttgtacgttgcctggtcatgctgccatttgttgacccgatggcacggttttgcaaaacgattattcgcgatgaaccggaactggatacccagctacggcctaaacatctggatgtcagcgcgctggatacgcccacgcttgctctggcgaacgccgcgcgcgaaaccctgcgcattggcgacgccatggaacagatgatggaagggttgaataaagtgatgcacggtgagccacggcaggagaaagagctgcgtaagctggcagatgatatcaacgttctctacaccgccattaagctgtatctggcgcggatgccaaaagaagagctggcggaggaagagagccgccgctgggcagagatcatcgaaatgagcctcaaccttgaacaggcctccgatatcgtcgagcgcatgggcagcgaaattgctgacaaaagtctggcagcacggcgggcatttagccttgatgggttgaaggaactggatgcgctctatgagcaattgctcagtaatttaaagctggcaatgagcgtgttcttctctggcgatgtcaccagcgctcgtcgtttgcgtcgcagcaaacatcgttttcgcattcttaatcgccgctattcccacgcccacgtcgatcgcctgcatcagcaaaacgtgcagagcattgaaaccagtagcctacatttaggcttactgggagatatgcagcgcctgaacagcctgttttgtagcgtggcttacagtgtgctggaacagccggatgaagatgaaggacgggacgagtattaatattgtgaatcctgtaggcctgataagacgcgtcaagcgtcgcatcaggcactatgaacaagatgccggatcatgcatccggcaattcacttaaaaacggtgaccagcttccagcggaaccgcttcttcaccagccttaaacacataagtggtgttcgggccacccagcgtagcgtgacctttactcactgtgatccagttaccttccggtagaccaataatcgtcagttctggcgcgacgaccagcagttcgcgaatacgctgctcacgggtttcacctttatggccttccggcagcgcgttggtgaagtgcgggttgatttgcagcgggaacagatttagcgcatcgaaaccttgcggatcgacaatcggcatatcgttggtggtacgaatagttgggcaagcaaggttagcgcctgcgctccagccaatatacagagcgccacgtttaaccacgtcagtaattggtgccagcagcccgcgctcgcggcactgtttcagcaactggaaagtattcccgccgccgacaatcacgatctcagcattttcaatcgcggcaacgggatcgacaacgctatgaataccggtgacagaaacacccagcggagcgagaaccgcagccgttttcgctgtgtaatcatcccaggtctgcgttacgccagcgaaagggataaacaccgcactgcggcgaccctgcaactgttcagcaattagcggcagtgcatgttccagccaggctttacccggcagcgtgctgttactcaataaaagcagttccattacttctccggttagtaagaaatcacgggaggcatgctaccactgcgaatttaaccacttactgacatggctcacgatgtcgcacattgcttctggaaagtgatttgagcaggtaacgaattcaagccaatggaaataacaaatagttcgctcatgactattttttatcaacccaaaggtacggtatattccgttttttacaggagaatttatgctgcccgacagtagtgtccgtttaaataaatacatcagcgaaagcggaatttgcagtcgccgcgaagcggatcgctatatcgagcaaggcaatgtgttccttaatggcaagcgagccaccattggcgatcaggtgaaacccggcgacgttgtgaaagtaaacggtcagttgattgaacctcgggaagccgaagatttggtacttatcgccctgaacaagcccgttggtattgtaagcaccaccgaagatggcgagcgcgataacattgtcgatttcgttaaccacagcaaacgcgtgttcccgattggccgcctggataaagactcccaggggctgattttcctcaccaatcacggcgatctggtgaataagatcctgcgtgctggcaatgatcatgagaaagagtatctggtgacggtcgataaaccgattaccgaggagtttattcgcggcatgagtgcgggggtgccaatcctcgggacagtgaccaaaaagtgcaaagttaaaaaagaagcgccgtttgtcttccgcattaccctggtgcaggggctgaaccgtcagatccggcgcatgtgcgagcatttcggctatgaagtgaaaaagctggaacgcacgcgcatcatgaacgttagcttaagcggcattccgctgggggaatggcgcgatttaaccgacgatgagttaatcgacctctttaagctcattgaaaattcctcttccgaggtaaaacctaaagcgaaggccaaaccgaaaacagcgggcatcaaacgtccagtcgttaagatggaaaaaacggcggaaaaaggcggtcgcccggcgtccaacggtaagcgttttaccagcccggggcgtaaaaagaaggggcgctgattaacgcctcagactgatgaaaacggcccaaaagtgcccggacagtcccctcgccccttcgggaaaagggttagggtgaggggaaaattgtgttcacactgacgagtgaaaatctcaggcgttgattgtggattagcgcctgccgcgcgtgctcgtatttgcactccagctaaaactcgcttcaggatccggtttataagcctgctttttcttcaactggcgggcttttttcgcttcagcctcacgctcaaccattaatttatcgatgtaatctttcttaatgctgttggtttcggagttggtcaatacgcgaccatgcgcaatccgcgcccgatccagcagtgttttaagttcacgctgctcgcgttcagtcatctctttttgggtaatacgggggagtgccatgatggtgccctcagtgagccagagagttcagtgtacgggaattcgtttgcgagcagaactgataatattcattttgccttctcttaactatttatctctttcgataattaattagagatgcagataaaaaaattaaaggcaattattctccgataaagacgctggttaacagagtacaggctcgtttattgatgagcatagtgacaagaaaatcaatacggcccgaaatatagcttccaggccatacagtatttactcaaacaaattactatgcagtttttgcaccacctgctcggcatcttcgccgggcaccaggaagcacaggttatggctggatgcgccataacaaatcatgcgaatgttgaacggttccagtacgccgaatacctctttgccaacgccgcaggctttactcaggtcattgccaatcaacgcgaccagcgccagaccttcttccacctccacccgacacagtgcggaaagctccatcagcagagattgcgtcagcaacgtatcgccagtggaggtactaccggtggtatcaagggttaatgccacgctcacttcactcgtggtgattaagtctacgctaatattatgccgcgcgaggatgccgaaaacttccgcgaggaaaccgcgagaatgcagcatattcaggctgtgcaaagtgagcagagtctgattgcgacgaagcgccagagcgcggaacagcggcggattttcagttttattgcacaccagcgtaccacctgcgcgtgggtctttgctggagccgacaaagaccgggatatcgctgcgtactgcgggtagcaacgttgccggatgcagtacttttgcaccaaaagttgccatctctgccgcttcggcaaacgcgatttcatcaatgcgttttgctgcggaaactacgcgtggatcggtggtgtagatgcccgggacgtcggtccagatatcaacacgagatgcgtgtaaagcctccgccagcaaggctgccgtataatcgctgcctccacggccaagcgtcgttgtacgacctttattttcgctaccgataaatccctgggtgatcactaagccttcattgagacgtgggagcagctgcagcgcggccagttccgccagcgcggctatatctggctctgcacgaccaaatcggtcgttggtacgcatcactttacgtacatcaaaccactgtgcctgaacatcgcgttcgcgcaggatctcaacaaacagcagggtgctcatcagctcgccgtggctgaccagctcatctgtcagcgccggagacgttgccagcgccgccgcttctgccagaacagtaatgttctccagcagacgttcaatctcttcacggataacgttcgggtaacgcagacgttccagaatggcaaactggatgttgcggatagcgtcgagtttttcgaatcgctcgccaggttccagtccttcagctaaagcgaccagcagattagtgataccagcagaagcgctgaggacaactaaacgcacgttggcatcagaaagcacaatatcagcgctgcggttcatggcgtcaaaatcagctacgctggtaccgccaaatttggagacaacaatttcagacataactacctcgtgtcaggggatccattttcagccttggcacaagggaagagcggaagacgggtgggcgcagagcgatacttcgctactattttcacccagaagtgctccaccacttgcgaaacgcccgactgcgaacgcttctggtgacaacccaggggattcagcccctgtagccgatgatgaacgtggccagccgttcaatcacctcggcgatgcaccccctcaggtgttatcacaggactggctcctccaacaccgttacttgggcaacgcgcctcttctggcctgcgctagcgcaggtagtacatttataaataaagggtgagcggggcggttgtcaacgatggggtcatgcggatttttcatccactcctggcggtcagtagttcagctaataaatgcttcactgcgctaagggtttacactcaacattacgctaacggcactaaaaccatcacatttttctgtgactggcgctacaatcttccaaagtcacaattctcaaaatcagaagagtattgctaatgaaaaacatcaatccaacgcagaccgctgcctggcaggcactacagaaacacttcgatgaaatgaaagacgttacgatcgccgatctttttgctaaagacggcgatcgtttttctaagttctccgcaaccttcgacgatcagatgctggtggattactccaaaaaccgcatcactgaagagacgctggcgaaattacaggatctggcgaaagagtgcgatctggcgggcgcgattaagagcatgttctctggcgagaagatcaaccgcactgaaaaccgcgccgtgctgcacgtagcgctgcgtaaccgtagcaataccccgattttggttgatggcaaagacgtaatgccggaagtcaacgcggtgctggagaagatgaaaaccttcagtgaagcgattatttccggtgagtggaaaggttataccggcaaagcaatcactgacgtagtgaacatcgggatcggcggttctgacctcggcccatacatggtgaccgaagctctgcgtccgtacaaaaaccacctgaacatgcactttgtttctaacgtcgatgggactcacatcgcggaagtgctgaaaaaagtaaacccggaaaccacgctgttcttggtagcatctaaaaccttcaccactcaggaaactatgaccaacgcccatagcgcgcgtgactggttcctgaaagcggcaggtgatgaaaaacacgttgcaaaacactttgcggcgctttccaccaatgccaaagccgttggcgagtttggtattgatactgccaacatgttcgagttctgggactgggttggcggccgttactctttgtggagtgcgattggcctgagcattgttctctccatcggctttgataacttcgttgaactgctttccggcgcacacgcgatggacaagcatttctccaccacgcctgccgagaaaaacctgcctgtactgctggcgctgattggcatctggtacaacaatttctttggtgcggaaactgaagcgattctgccgtatgaccagtatatgcaccgtttcgcggcgtacttccagcagggcaatatggagtccaacggtaagtatgttgaccgtaacggtaacgttgtggattaccagactggcccgattatctggggtgaaccaggcactaacggtcagcacgcgttctaccagctgatccaccagggaaccaaaatggtaccgtgcgatttcatcgctccggctatcacccataacccgctctctgatcatcaccagaaactgctgtctaacttcttcgcccagaccgaagcgctggcgtttggtaaatcccgcgaagtggttgagcaggaatatcgtgatcagggtaaagatccggcaacgcttgactacgtggtgccgttcaaagtattcgaaggtaaccgcccgaccaactccatcctgctgcgtgaaatcactccgttcagcctgggtgcgttgattgcgctgtatgagcacaaaatctttactcagggcgtgatcctgaacatcttcaccttcgaccagtggggcgtggaactgggtaaacagctggcgaaccgtattctgccagagctgaaagatgataaagaaatcagcagccacgatagcagcaccaatggtctgattaaccgctataaagcgtggcgcggttaatcatcgtcgatatgtaggccggataaggcgttcacgccgcatccggcaaccgatgcctgatgcgacgcggtcgcgtcttatcaggcctacaggtcgatgccgatatgtacatcgtattcggcaattaatacatagcacgattgattaaataaccttaataacaatgccgacgttatgtcggcatttttttatcagataaatccccttgtctgtaatttaacggaaatcataccgtgaggttaatcctaaaatagatttttaatcgttgtttatttcggaaaatacgcagattaattgcttttgtttttattttaagtttatgatttttattgttatttaaatataagttgaaacttatatttgatattcattccaattatcctaaaacgccatcgctaattccccgcgccgtaattcgcatgctttagttgtgtatactcgatcccgcccgaaatgtttttgggtaaatctccattcattcaatgaagggaaattgttatgaaaaaagttctgtatggcatttttgccatatctgcgcttgcggcgacttctgcgtgggctgcacctgtacaggtgggcgaagcggcagggagcgcagcaacgagcgttagcgcggggagttcctccgcgaccagcgtcagcaccgtaagcagcgcggtgggtgtcgcgcttgcggcaaccggtggcggtgatggttctaataccgggaccaccacaaccacgaccaccagtacccagtaataaagtatgtatccccaaaataattcgagtcattgcatctgtggctagaagtatgaagggattaaccataaccacactccggtgtggttattctgcccctctggagaagagtcgtgaagcgacctgcactcattcttatctgcctgttattacaggcctgtagtgccacgactaaagagctgggcaatagtctgtgggacagtctgttcggcacgccaggcgtacagctgacggatgatgatattcaaaatatgccctacgccagccagtacatgcagcttaatggcgggccgcagttatttgtggtgctggccttcgctgaagacggacaacaaaaatgggtcactcaggatcaggctactctcgttacccaacatggccgtctggtgaagactctgctcggcggcgacaacctgattgaagtgaataaccttgctgccgacccgctgattaaacccgcacaaatcgttgatggcgcaagctggacgcgcacgatgggctggaccgagtaccagcaggtacgctacgccaccgcacgcagtgtcttcaaatgggatggcaccgataccgtcaaagtcggcagcgatgaaaccccggttcgcgtgctggacgaagaagtctccaccgaccaggcgcgctggcataaccgctattggatcgacagcgaagggcaaattcgccagagcgaacagtatctcggcgcggattattttccggtgaaaaccactctcatcaaggcggcaaaacaatgattaaacaaactattgtcgcgttgcttttgagtgtgggagcgagtagcgtcttcgcggcaggaaccgtcaaggtgttcagcaatggcagcagtgaggccaaaacgctaacgggcgcagagcatttaatcgatctggtaggccaaccgcggctggcaaacagctggtggcccggtgcggtgattagcgaagagctggcaacggcggcagcattgcgtcagcagcaggcgttgctgacacggctggcagaacagggcgcagattccagcgccgacgatgccgctgcgattaacgccttacgccagcaaattcaggcgttgaaagtgacgggcaggcaaaaaatcaatcttgatcccgatatcgtccgcgttgccgaacgcggtaacccgccgttgcagggcaactacacgctgtgggtcggaccaccgccgtccacggtcacgttgttcgggcttatcagccgtcctggcaagcagccattcactccaggtcgcgacgtggcgagctatctctctgaccagagcctgctcagcggtgcggatcgcagctacgcgtgggtggtttacccggacggacgcacgcaaaaagcgccggtggcttactggaacaagcgtcacgtagagccgatgcccggcagcattatttatgttggcctcgcggactccgtctggagtgagacgcctgatgcccttaacgccgacattcttcagactctgacgcagcggatacctcaataatgaaaaaaagacatctgcttagcttactggcgctgggcattagcacagcttgctacggcgaaacatatcctgcgcccattggtccgagccagagcgatttcggtggcgtaggattattacaaacgcccaccgcgcgtatggcacgggaaggggagttgagtctgaactatcgcgataacgatcagtaccgttattacagtgctagtgtgcaactcttcccgtggctggaaacaacgctgcgctacaccgacgtgcgcacccggcagtacagcagcgtcgaagcgttctctggcgatcaaacgtataaagataaagccttcgatctcaaactgcgtttgtgggaagagagttactggctgccgcaagtggcggttggtgcgcgggatatcggcggtacggggctgtttgatgcggaatatcttgttgccagcaaagcctgggggccgttcgattttacgctcggcctgggctgggggtatttgggcaccagcggtaatgtgaaaaatccgctctgtagtgccagtgataaatattgctatcgcgataacagctacaaacaggcgggatctatcgacggtagccagatgttccacggtcctgccagtctgtttggcggcgtggaataccagacgccctggcaaccgctgcgcctgaaactggagtatgaaggcaataattatcagcaggattttgccgggaagctggagcaaaaaagtaagtttaacgtcggtgcgatttatcgcgttaccgattgggccgacgttaaccttagctatgaacgtggcaacacctttatgtttggcgttacgttgcgcaccaactttaacgatctgcgcccgtcttacaacgataacgcccgcccgcaatatcaaccgcagccgcaggatgccattttgcagcatagcgtggtggcgaatcagttaacgctgttgaaatacaatgccggacttgccgatccacagatccaggcgaaaggcgatacgctgtatgttaccggcgagcaggtgaaatatcgtgatagccgcgaagggatcatccgtgcgaatcggatcgtgatgaacgatctgccggatgggatcaaaacgatccgcattacggaaaatcgccttaacatgccgcaggtgacgacggaaaccgatgtcgccagcctgaaaaatcatctcgccggagagccgttgggccacgaaacgacgctggcgcaaaaacgcgtcgagccagtggttccgcagtccaccgagcagggctggtatatcgacaaaagtcgctttgatttccatatcgatccggtgctgaaccagagcgtcggtggcccggaaaacttttacatgtatcagctgggcgtgatgggaacggcagatttgtggctgacggaccatctgctgaccaccggcagcctgtttgcaaatcttgccaacaactacgacaagtttaactacactaatcctccgcaggacagccacttaccgcgcgtgcgtacccatgtgcgcgagtatgtgcagaacgatgtctatgtgaataacctgcaagccaactacttccagcatctgggcaacggcttctacggtcaggtctacggtggttatctcgaaaccatgtttggcggtgcgggggcagaagtgttgtatcgcccgctggacagcaactgggcgtttggtctggatgccaactacgttaaacagcgcgactggcgtagtgcaaaagatatgatgaaattcaccgactacagcgtgaaaaccggacatctgaccgcctactggacgccatctttcgctcaggatgtgttagttaaagccagcgtcgggcagtatctggcaggggataaaggcggcacgctggagatcgccaaacgctttgatagcggcgtggtggtgggtggctatgccacgatcactaatgttagcaaagaggagtacggcgaaggggacttcaccaaaggcgtgtatgtcagcgtaccgttggatctcttcagctctggcccgacacgcagccgtgcggcgattggctggacgccgctgacgcgtgacggtggtcagcaacttgggcgtaagttccagttgtatgacatgaccagcgaccgtagcgtcaatttccgctaagtcatgggaaaggtgccagttttcgcactcactggcaccttcattcttaatggcctgtcgagccatcaggaacgcagttcactcccggtttgcgatctggtgtgtaaaggcgaaaacattctgtcttcctgtccgtcgatatcggttgcaggtctggttgcctgagcgactgggccatcattgggctggagacattgctttgcggtaggtcggctttatcagcagtaccgagcggaccagcataagcaggaagaacagagactgataacatcaaagcagcaaaataaggcttcatttttaccacctttatcaggttacgtttcatttgttccagaggaacattgtcgatttttcgcgcattgctggtggctgggaatcacctgaatgggtgatttttgaattaccggctttggtgcggtttgtcttgccggatgcgccgccaggcgcggcttatccggcctacgggtaggtatatccggctttggtggaggcgcgctccaaatccaggttgaacaaaacatacacaaaaaatatagatctccgtcacatttttgcgttatacaggaagctcgccactgtgaaggaggtactgctatgacgagtctctctcgtccgcgcgtggagtttatctccaccattttgcagaccgtactcaatcttggcctgctgtgcctcggcctgattttggttgtcttcctcggcaaagaaacggtgcatctggctgatgtgctgttcgcgccagaacaaaccagcaaatatgagctggtagaaggactggtggtttactttctctatttcgaatttatcgcgctgattgtgaagtactttcagtccggttttcacttcccgctacgttactttgtctatattgggatcaccgccattgtgcgcttgatcatcgtcgatcataaaagcccactggatgtgttgatctacagcgctgcgatcctgttactggtgatcaccctgtggctgtgtaatagcaaacggctgaagcgggagtaaaaagtcagcacgccgaaatggcgcggcgtgctggacaggaagattacagcgtagcagtttgttgtgttttcttcgtttccggttcccagagcgcttccagctcctcaagggttttacctttggtttccgggacaaatttccacataaacagtgctgccagaacgcccatacaaccgtaaatccagtaggagaaaccgttgtggaaatgggccaccagccaggagtttttgtccatcatcgggaaggtccaggagacgaagtagttcgccagccactgggccgccaccgcgattgccagcgctttaccacgaatagcattcgggaagatttcgctcagcagtacccagcataccggaccccaggacatggcaaaggcggcaacatagaacagcatgctcagtagcgccacaatacccggtgcctgagtgtaaaacgcggtaccgaggctaaacataccgattgccattccgagtgcgccgataatttgcagtggcttacgaccaaatttatccaccgtcataattgccagaacggtgaaggtgaggttgataactccgacaataatggtctgcaacagcgcgatatccgtgctggcccccagcgttttgaacacttccggcgcgtagtacagcaccacattgatgccgacaaattgctggaagatggagagcattacgccgattacaatcacgcccacgccaaacatcagcagacgaccaccggttttgcggccatgatccagggagtgtttaatttcctgtactgcctgagttgcaagcgtgttgcccataattttgcgcaggataccttccgcctgttcttgcttgccgcggctcatcagccagcgaggactttctggcacggtatacagcagcattaagaacagcagtgcagggatacattcgctggcaaacatataacgccagccgtcagtattcagccagctggcatcaccggaacgggcaataaaatagtttacgcagtaaactaaaagttgcccgaaaataatcgcaaactggttaaaagagaccagtttcccgcgaatatgagctggagccagttccgcaatatacattgggctgagcatactggctaaaccaacgccaataccgccaataatgcgataaataacaaattccgggacataacctgccagataaacaggcacagtgttgtccgggtttatagaggtaaaaccaagttctggccaggcagaacctacaccagaaataaaaaacaggacagcagcaatcttaagactatcacgacgaccgaagcggttactgcaataaccaccgagggcaccgccgatgatgcaaccaatcagagcgctggccacgcaaaaccctaacagggagttggcagcggattcacttaagttttgtggagcaacaaagacggtattgagactctcaacagtaccggaaataacggcggtgtcgtagccaaataataaaccacctaatgtagcgactaaggtaatgctaaatatataactggaattatactgggtattcattcagacctgccttagaccattctgatcttttatcagtgcattgatgttggaattgtcaggcagttaaggcaattatcattttttacaatgcgtttacgtaatgtcttttctgtgatcttaattgtgataattatccaaaattgataaaaacaatactattgccgtgactcagagcacgaaagagaattatcgtaagtgggaaaacaaataacgtaaaaataataagctctatgatggaaatattaaccggcgaacgattcagattgcagacgaaagaaaaaaaggcgctccgtggagcgccgaataacagtcacaagttgggataacgtaagttgagggtgcagcggcataacattggcagaacaacatctttaacctttcacaccacctgccgtcaggccgttgaccagccagcgttgagccagcaagaagacgatggtgatcggtaatgcagacatcacggcagcggcggcaaagtcaccccacaggtagttttgcgggttgaggtattgctgcatccccacggccagggtgtagctgtttacgtcacgcagtaacaggctcgcgaccggaacttcagtaatggcagcgataaagctcaggatgaataccaccgccagaatcggtacactcagcggcaacaggacaaggcggaaggcctgccacggtgtcgcaccatccagcgcagcagcttcttccaggctactgtcgatggtttcgaaatagcctttgatggtccagacatgcagcgcaatcccacccagatacgcgaaaattacgccgccgtgagtattcaggccaatgaatggaatgtactcacccagacgatcaaacaacgcatacaacgcgaccagactaagtactgccgggaacatctggaaaatcagcattcctttcagcagcgtcgctttgcctggaaagcgcatacgggcgaaagcgtaggcgcaggtggtggagagcgccacaatgccaatcgcggaaatcccggcgacctttacgctgttccacagccacagcagtaccgggaatggcggtggcgtaatgcgaccatcagcctgttcaacgctaaaacctaacgccagtttccagtgatcccaggagatttgctccgggatcaggctgccggtcgcaaagtttccctgacgcaggctgatagcgacgaccatcagcagcgggaacataatcgctgcgataaaaagtagcagtagcaggtgagtaataaataaacgagctttttggcttttcggttggaccattgccatttttgttatctcccttaatcaaacttcattcgcgtggctttcaggttcactatcgccagcgcacccaccagcaggaagatcagcgtggcaattgctgccgccagaccgaagtcctgacccccgccgccttcaaaagcgatgcggtaggtgtagttaacaagcaggtcggtataaccggctggcgtggtcgtgccaagacgatccgggccgccgttggttaacagttgaatcagcacgaagttgttaaagttaaaggcgaagctggcgatcatcagcggcgtcagcggtttaatcagcagcggcagcgtaatcttaaagaagttctggaacggacctgcgccatccattgcactggcttcatacaaatcgtccggaatcgctttcagcaagcccatgcagaggatcatcatgtacggataacccagccaggtattgacgataattagcatcgtgcgggcggtggtcggatcgctgaaccaggcgggcttcacgccaaacagcgcgctcaacatcatgttgatttcaccgaagctctggttaaacaaccctttgaaaatcaagatactaatgaagcttggcaccgcgtagggcagaatcagcaggacgcgatagaccgctttgccgcgcaacgcttcccactgcaccagacacgccagaaccatgccgaccgccaccgttaaaaagacagtgatcaggctgaacaccacggtccagacgaaaatggcgaggaacggtttctgaatgccttcgtcggtaaagacgcgggtaaagtttttccagccggtggtcacggtgtaaccggggcttagcttttcatcaccccagttgccgtcggcggtaatggactggtaaaagccaatttggttattcggacgatatttcacgccgctctgattattcgtcaacgtgccgtcaccgtcgagtgtgtagagcggctgcgtgccagaaaactggcgcagggagctcatcatcactttgttgccatccggcagaatggcggtaatgtcactcagcgcctgacgattctgggtaatcacgcgcagattcgcgcgttcgccttcgggctgggcggtcgtttctttcagttgcagtttttgctcgccgccaaatttaaaagcgtcggagaggtaatttttgccggtttcgccgtcgctgagcgccagttgccactcatcgcccgccgggtaaagaccaaagttataggttttgcctgcttgccaggagcgatctaacaacacttcctgcgcacgttcaaaagtcagctggttagtgctgctgtagttggtgaaggcaatggcgatggtgcagaccagagggaagaggacgaataatcccattccagccattcccgggtaaacatagcgccaggcgtaggctttacgattggcgaaaatatacagccccgcactactcaatatcagcgtggtaatggcgaacaggtattccccttgtgcgtacattaaaacaacaaggtaacccaccagcaggccgagcagacctagcacactccatttcagcgcgtcgctttgccaccaatgtttctttttaatgacatccatggggttcttcctcattccaggacggataaggctttcacgccttatccgacaacaactgcctgatgcgacgctgacgcgtcttatcaggcctacatacgtttcggttttgtaggccggacaaggcgttcacgccgcatccggcatttcacagcattacttggtgatacgagtctgcgcgtctttcagggcttcatcgacagtctgacgaccgctggcggcgttgatcaccgcagtacgcacggcataccagaaagcggacatctgcgggatgttcggcatgatttcacctttctgggcgttttccatggtggcggcaatacgtggatctttcgccaactcttcctcgtaagacttcagcgctacggcacccagcggtttgtctttattaaccgcttccagaccttcatcagtcagcagatagttttcgaggaactctttcgccagctctttgttcggactggcggcgttaatacctgcgctcagcacgccaacgaacggtttggatggttgacccttgaaggtcggcagtaccgttacaccataattcactttgctggtgtcgatgttggaccatgcccacgggccgttgatggtcatcgctgtttcgcctttattaaaggcagcttctgcgatggagtaatcggtgtctgcattcatgtgtttgtttttaatcaggtcaaccaggaaggtcagacccgctttcgcgccagcgttatccacgcccacgtctttaatgtcgtacttgccgttttcatacttgaacgcataacccccgtcagcagcaatcagcggccaggtgaagtacggttcttgcaggttgaacatcagcgcgctcttacctttcgctttcagttctttatccagcgccgggatctcttcccaggtttttggcgggttcggcagcagatctttgttataaatcaggcttaacgcttcaacagcgatcgggtaagcaatcagcttgccgttgtaacgtacggcatcccaggtaaacggatacagcttgtcctggaacgctttgtccggggtgatttcagccaacaggccagattgagcgtagccaccaaagcggtcgtgtgcccagaagataatgtcagggccatcgccagttgccgcaacctgtgggaatttctcttccagtttatccggatgctcaacggtgactttaattccggtatctttctcgaatttcttaccgacttcagcgagaccgttatagcctttatcgccgttaatccagattaccagtttaccttcttcgattttggcgagagcgctggcggaaaacatcatcgtcgttaatgcggataatgcgaggatgcgtgcacctgtttttattttcataatctatggtccttgttggtgaagtgctcgtgaaaacacctaaacggactctagtttctttatacggcaacctctttccatcctccttgcccctacgccccaccgtcgctttgtgtgatctctgttacagaattggcggtaatgtggagatgcgcacataaaatcgccacgatttttgcaagcaacatcacgaaattccttacatgacctcggtttagttcacagaagccgtgttctcatcctcccgcttcctcccccataaaaaagccagggggtggaggatttaagccatctcctgatgacgcatagtcagcccatcatgaatgttgctgtcgatgacaggttgttacaaagggagaagggcatggcgagcgtacagctgcaaaatgtaacgaaagcctggggcgaggtcgtggtaagcaaagatatcaatctcgatatccatgaaggtgaattcgtggtgtttgtcggaccgtctggctgcggtaaaagcactttactgcgcatgattgccgggcttgagacgatcaccagcggcgacctgttcatcggtgagaaacggatgaatgacactccgccagcagaacgcggcgttggtatggtgtttcagtcttacgcgctctatccccacctgagtgtagcagaaaacatgagttttggcctgaaactggctggcgcaaaaaaagaggtgattaaccaacgcgttaaccaggtggcggaagtgctacaactggcgcatttgctggatcgcaaaccgaaagcgctctccggtggtcagcgtcagcgtgtggcgattggccgtacgctggtggccgagccaagcgtatttttgctcgatgaaccgctctccaacctcgatgctgcactgcgtgtgcaaatgcgtatcgaaatctcccgtctgcataaacgcctgggccgcacaatgatttacgtcacccacgatcaggtcgaagcgatgacgctggccgacaaaatcgtggtgctggacgccggtcgcgtggcgcaggttgggaaaccgctggagctgtaccactatccggcagaccgttttgtcgccggatttatcggtagcccaaagatgaacttcctgccggtaaaagtgaccgccaccgcaatcgatcaagtgcaggtggagctgccgatgccaaatcgtcagcaagtctggctgccagttgaaagccgtgatgtccaggttggagccaatatgagcctgggtattcgcccggaacatctactgccgagtgatatcgctgacgtcatccttgagggtgaagttcaggtcgtcgagcaactcggcaacgaaactcaaatccatatccagatcccttccattcgtcaaaacctggtgtaccgccagaacgacgtggtgttggtagaagaaggtgccacattcgctatcggcctgccgccagagcgttgccatctgttccgtgaggatggcactgcatgtcgtcgactgcataaggagccgggcgtttaagcaccccacaaaacacacaaagcctgtcacaggtgatgtgaaaaaagaaaagcaatgactcaggagatagaatgatgattactctgcgcaaacttcctctggcggttgccgtcgcagcgggcgtaatgtctgctcaggcaatggctgttgatttccacggctatgcacgttccggtattggttggacaggtagcggcggtgaacaacagtgtttccagactaccggtgctcaaagtaaataccgtcttggcaacgaatgtgaaacttatgctgaattaaaattgggtcaggaagtgtggaaagagggcgataagagcttctatttcgacactaacgtggcctattccgtcgcacaacagaatgactgggaagctaccgatccggccttccgtgaagcaaacgtgcagggtaaaaacctgatcgaatggctgccaggctccaccatctgggcaggtaagcgcttctaccaacgtcatgacgttcatatgatcgacttctactactgggatatttctggtcctggtgccggtctggaaaacatcgatgttggcttcggtaaactctctctggcagcaacccgctcctctgaagctggtggttcttcctctttcgccagcaacaatatttatgactataccaacgaaaccgcgaacgacgttttcgatgtgcgtttagcgcagatggaaatcaacccgggcggcacattagaactgggtgtcgactacggtcgtgccaacttgcgtgataactatcgtctggttgatggcgcaagcaaagacggctggttattcactgctgaacatactcagagtgtcctgaagggctttaacaagtttgttgttcagtacgctactgacagcatgaccagccagggtaaagggctgagccagggttctggcgttgcatttgataacgaaaaatttgcctacaatatcaacaacaacggtcacatgctgcgtatcctcgaccacggtgcgatctccatgggcgacaactgggacatgatgtacgtgggtatgtaccaggatatcaactgggataacgacaacggcaccaagtggtggaccgtcggtattcgcccgatgtacaagtggacgccaatcatgagcaccgtgatggaaatcggctacgacaacgtcgaatcccagcgcaccggcgacaagaacaatcagtacaaaattaccctcgcacaacaatggcaggctggcgacagcatctggagtcgcccggctattcgtgtcttcgcaacctacgccaagtgggatgagaaatggggttacgactacaccggtaacgctgataacaacgcgaacttcggcaaagccgttcctgctgatttcaacggcggcagcttcggtcgtggcgacagcgacgagtggaccttcggtgcccagatggaaatctggtggtaatagcaaaacctgggccggataaggcgtttacgccgcattcggcaaccaacgcctgatgcgacgcttgcgcgtcttatcaggcctacaacggctgtcaaatgtaggccggataaggcgtttacgccgcatccggcataaaaacaggttgtcattatctgaaaggggcgaaagcccctctgattatcgggtttagcgcgctattgcctggctaccgctgagctccagattttgaggtgaaaacaatgaaaatgaataaaagtctcatcgtcctctgtttaagtgcagggttactggcaagcgcgcctggaattagccttgccgatgttaactacgtaccgcaaaacaccagcgacgcgccagccattccatctgctgcgctgcaacaactcacctggacaccggtcgatcaatctaaaacccagaccacccaactggcgaccggcggccaacaactgaacgttcccggcatcagtggtccggttgctgcgtacagcgtcccggcaaacattggcgaactgaccctgacgctgaccagcgaagtgaacaaacaaaccagcgtttttgcgccgaacgtgctgattcttgatcagaacatgaccccaagtgccttcttccccagcagttatttcacctaccaggaaccaggcgtgatgagtgcagatcggctggaaggcgttatgcgcctgacaccggcgttggggcagcaaaaactttatgttctggtctttaccacggaaaaagatctccagcagacgacccaactgctcgacccggctaaagcctatgccaagggcgtcggtaacagcatcccggatatccccgatccggttgctcgtcataccaccgatggcttactgaaactgaaagtgaaaacgaactccagctccagcgtgttggtaggacctttatttggttcttccgctccagctccggttacggtaggtaacacggcggcaccagctgtggctgcacccgctccggcaccggtgaagaaaagcgagccgatgctcaacgacacggaaagttattttaataccgcgatcaaaaacgctgtcgcgaaaggtgatgttgataaggcgttaaaactgcttgatgaagctgaacgcctgggaagcacatctgcccgttccacctttatcagcagtgtaaaaggcaaggggtaattacgccccacagtgctgattttgcaacaactggtgcgtctcctggcgcacctttttttatgcttccttcctgggatatgagcgattttttatagtaactcacttcttcttcactaagaatatccattatctcaatgccttatcagagattcttttcctttcgccggtagtgtctggacattcaggctacttttccaggttattttatttctgttatgcagaggttttatgataagtcatatcctaaattctggcggcaataactctttgatgaaacatgatgtggtgcaaggaaataatatagtagatcttgatttactacgtaatttaaatggggtgccaggtttaaacagagataactttatttatatcagcaatattttttcaaatataaaacaacggaacgaaaaaatcatgcaataaatatgtttcgtgaagtctcaatcagtaatgatactataagtgtaaaattctacagaaatgaaaaaaattgaatgcgcttgcaattttctgatggataaagatgcgcaggggtatatcgacctgtctgatttggatttaacaagttgtcattttaaaggtgacgttataagcaaggtgtcttttttaagtagtaatctacaacatgtaacattcgaatgtaaagaaattggggattgcaattttactactgcaatagttgataatgtcatatttagatgtcgacgtttacacaatgtgatttttatcaaagcgagtggtgaatgtgtcgatttcagcaaaaatattcttgatacagttgacttcagccagagtcaacttggtcatagtaattttcgcgaatgtcagattagaaatagtaacttcgataattgttatctttacgctagccacttcaccagagcagagtttctgtctgccaaagaaataagttttattaaaagcaatttgacagctgttatgtttgattatgtgcgaatgagcacagggaattttaaagattgcattacagaacaattggaattaactattgattatagtgatatattttggaatgaagatctcgatggttatatcaataacattataaaaatgattgatacattgccagataatgcaatgatattgaaatccgttctggccgtaaaactggtgatgcaattaaaaatacttaatattgttaataaaaactttattgagaatatgaagaaaatatttagccattgtccttatataaaagatcccattatacgcagttatatccattctgatgaagataacaagttcgatgattttatgcgtcaacatcgattcagtgaggtgaatttcgatacccaacagatgatcgattttattaacagatttaatacgaataaatggctaattgataaaaataacaatttttttatccaacttatcgatcaggccttacgaagtacggatgatatgatcaaagcaaatgtttggcatctttataaagagtggattcgtagtgatgatgttagtcctatatttatagaaactgaagataatttaagaacctttaacacgaatgaattaacacgaaacgataatatctttatcctgttctccagtgtcgatgatgggccagttatggtggtaagctcccagcgcttacatgatatgttgaatcctacaaaagataccaattggaattccacgtatatctacaaatccagacatgagatgttgcctgttaatcttactcaggaaacacttttcagctccaaatctcatggtaaatatgcgcttttccccatttttactgcgagttggcgagctcatcgtataatgaataagggtgtttaagtaaaggaaaacatcaccgttcctggcatcctggacggtgatgcccctacggttgccctcgccagcacgggcatcggtaaagcgtaaggttcaacatcgttttaccacttcatgcgattgttgcgtttttgttgcgtattagatcacttaatttgctttacatctcccgtaaacacttttctgcgatacaatgcctttacgttatgtaacggagagttcggcatgagtcaccccgcgttaacgcaactgcgtgcgctgcgctattgtaaagagatccctgccctggatccgcaactgctcgactggctgttgctggaggattccatgacaaaacgttttgaacagcagggaaaaacggtaagcgtgacgatgatccgcgaagggtttgtcgagcagaatgaaatccccgaagaactgccgctgctgccgaaagagtctcgttactggttacgtgaaattttgttatgtgccgatggtgaaccgtggcttgccggtcgtaccgtcgttcctgtgagtacgttaagcgggccggagctggcgttacaaaaattgggtaaaacgccgttaggacgctatctgttcacaagtagcacattaacccgggactttattgagataggccgtgatgccgggctgtgggggcgacgttcccgcctgcgattaagcggtaaaccgctgttgctaacagaactgtttttaccggcgagtccgttgtactaagaggaaaaaaatatggagtggagtctgacgcagaataagctgctggcgtttcatcgcttaatgcgtacggataagccaattggcgcgttactgctgctctggccaacattatgggcgttgtgggtggcgacaccgggcgttccccagctctggatcctggcggtgtttgtcgcgggtgtctggctgatgcgcgctgccggatgtgtggtgaatgattatgctgaccgcaagtttgatggtcatgttaagcgcacggcgaaccgaccacttcccagcggcgcggtaacagagaaagaggcgcgcgcgctgtttgtcgtgctggtactgattagctttttactggtgctgacgctgaatacgatgaccattctgttgagcattgccgcgctagcgctggcgtgggtgtacccgtttatgaagcggtatacccatctaccgcaagtggtgctgggcgcggcgtttggctggagcattccaatggcttttgccgctgtgagtgagagcgtgccattgagttgctggttaatgttcctcgccaatattctctgggcggtggcttacgacacgcagtatgcgatggttgaccgcgatgatgatgtgaagattggcattaaatccacggcaatcctgttcggccaatacgataaattgattattggtattttgcagattggcgtactggcactgatggcgatcatcggtgagttaaatggcttaggctggggatattactggagtattctggtggctggcgcgctgtttgtttatcaacaaaaactgattgccaaccgcgagcgtgaagcctgctttaaagcatttatgaataataactatgttggtctggtactatttttagggctggcaatgagttactggcatttctgatgatgtaaaaaagccggatgatcatccggctttcttctgggttgcctgatgcgcggcgcttctcaggcctacacaacacatcgcaatttattgaatttgcagattatggaaggccggataaggcgttttcgccgcatccggcaattctctctgattacccttcgccctgcgtcgcactctcaatcgtcaaacgcacgtcacttgtaatcaactccgccagcaactgataaaccttcatcgtttctgccggttcggcatcgccgctatcgctgatatacccttcatcacgcagtgtcagcaccagagaactgaacaccgccttgtcgaagaactccggcgcgttgatgccgtgcagcacggagagacgttgcgcgacggtgcggctctctttctccagcgtaccgcggttgatgctcgggttggcactcaacaaccagaaggtgatggcataacgttgcagcgtttcgcgcgcgcctgcggccagcagctgtagcgtgcgagaatgcgccgggttgatatgcaactcatcatcttgcagggtaatcagcccctgacgttgcatctcatttgccagcgcatcaataacgtccggcaactcgtcgcgatcccagcgcaggaacagctccgctttcagcattgggtaaagcacattgacgtgctccatcaatacgtcgcgggagatgtggcgatgctgggtgacgattgccgccatcaggctaggcagcaccaacatatgcgcaatgttgttgcgatagtaggtcatcagcaccgcttgctcgcgcggcagaatgatgatgtcgccgattgtgtctttctcgacttcaaacttgttcatttgcagcgcgtgatcgataagctcgctggcgctggcactaggaacggtagagtccgtggagtagggcacgttgcgcatcagatccaggtagcagttgagttgctcggttaactgctcgcgggtgagactgcgctgacgacttgccagtagcgcagtacagcacaggttcatggcgtttgccgcgcctgcgttgttaatgcgtaccatcagatcggcagcaatattattgaccgtcggcgttaaccatgccggacgcaccgcttcgatgggatcgatagattcacgccagtcaggtacatgctggttaaggtaggtcatcaacggcattggttcaccgaagttgacgtaaccctgaccgagattacgcagcttgcttaaaccgcgcagcatctgcggcaggctctctttctctttcgtcgcgccgcgcagttctttggcgtaagtacccacttccatgacgtgctcataaccgatatagatcggaatcagcgtaatcggacgcgtgccgccacgcagcatcgcctgaatggtcatgctcagcgtaccagttttcggatccagcaaacgccccgtacgggaacgaccgccttccacgaagtactcgacggaataaccacggctgaacagttcgccgagatactcccggaaaacggtggaataaagtttattgcctttaaacgtacggcgaataaagaacgcccccagacggcggaaaatcggcccggcaggccagaaattcaggttgatcccggcggcgatatgcggcggcaccagcccctggtgatacagcacgtaagaaagcagcaggtagtccatgtgactgcggtggcaaggcacatataccagctcatgaccgtcgtgggccagctggcgaacgcgctcagcgttatggacgttgatgccctggtaaagtcggttccaggtgaagcccagaatacggtcagtcaggcgaatcatctcgtaagagaaattcgccgcaatctcttccatcagtgcaatcgcgttctgctgcgctttttcatgggagatttttttgctgcgcgcttcatcttctaccgctttggcaatggcgcgggaggcgagcagcttattaaacagatcctgacgagcaggcaaacgtgggcctacggcagccagacgttgacgggcaaagtgcatacgcgccacgcgcgccagtttctgagcgatagttttatccgtgccgtgttcatccgccatacggcgcaggctaacactcgggctgaaacgcacaaaactgtcgcgaccgagccacagtacagcgaaaaatttctgtacgccgttaagcatacgcagcggcgggttcacttcgcctttttcacgccccggcgcgcgaccaaacatcacgctcactggcaccatctgcacatccagatttgggttgctacggtgcaaatcgagatagtcgtggaacagcttaatagactcttctttcggcgtgtaataggtgaacacacgcggcccgccgtgaatgaacacatagcgcggcagtagcgtgccgtcgatttccagcggctctaacgggtcaggcaagtcatgtgccagacactgggcgcgcaacgtcagcaaatctgctttgctgttgtacggtaaaacgtacataattggacgagaggtatccagccccagttccggggcaggatctgccggaatagacttgctttttaccaggatgcttaatggtaaattcagtaatttgtagtaaattcgtggccagccggacataaacgatgtaaagcctctggttaataatgcaaatgcgcggcaaggatagcagaaagtcatgggaaattctgtggtatccgctcatgtttcgcgcggcgctacgcaaacccgaatcatcggatttaacggtacactgatattgacgctcataatgtaaaaaggttctttcaatggccaataataccactggattcacccgaattatcaaagctgctggctattcctggaaaggtttacgcgctgcatggatcaacgaagcggcattccgtcaggaaggcgtagcggtattgttggcggtggtcatcgcctgctggctggatgtggacgcgattacccgcgtgctgcttatcagctccgtgatgctggtgatgattgtggaaatcctcaatagcgccatcgaagcagtggttgaccgaattggctctgaataccatgagctttccggacgcgcaaaagatatgggatccgctgcggtgctgattgccattatcgtcgccgtgattacctggtgcattctgttatggagccattttggataacccttccagaattcgataaatctctggtttattgtgcagtttatggttccaaaatcgccttttgctgtatatactcacagcataactgtatatacacccagggggcggaatgaaagcgttaacggccaggcaacaagaggtgtttgatctcatccgtgatcacatcagccagacaggtatgccgccgacgcgtgcggaaatcgcgcagcgtttggggttccgttccccaaacgcggctgaagaacatctgaaggcgctggcacgcaaaggcgttattgaaattgtttccggcgcaagtcgcgggattcgtctgttgcaggaagaggaagaagggttgccgctggtaggtcgtgtggctgccggtgaaccacttctggcgcaacagcatattgaaggtcattatcaggtcgatccttccttattcaagccgaatgctgatttcctgctgcgcgtcagcgggatgagcatgaaagatatcggcattatggatggtgacttgctggcagtgcataaaactcaggatgtacgtaacggtcaggtcgttgtcgcacgtattgatgacgaagttaccgttaagcgcctgaaaaaacagggcaataaagtcgaactgttgccagaaaatagcgagtttaaaccaattgtcgttgaccttcgtcagcagagcttcaccattgaagggctggcggttggggttattcgcaacggcgactggctgtaacatatctctgagaccgcgatgccgcctggcgtcgcggtttgttttagttctctcttcatcaggcttgtctgcatggcattcctcactagttctgataaagcactctggcatctcgccttacccatgattttctccaatatcaccgttccgttgctgggactggtcgatacggcggtaattggtcatcttgatagcccggtttatttgggcggcgtggcggttggtgcaacggcgaccagctttctctttatgctgttgctgtttttacgcatgagcaccaccgggctgactgcgcaggcttatggtgccaaaaatcctcaggcattagcccgtacgctggtgcaaccgttgctgttggcgttgggggctggggcgttaattgcgctgctgcgtacgccgattatcgatctggcgctgcatattgttggcggtagtgaggcagtcctggaacaggcgcggcgctttcttgaaatccgctggttaagcgcaccggcgagcctggcgaatctggtattactcggttggttactcggcgtgcaatatgcccgtgcgccagtaattttgttagtggtcggcaatatcctcaacattgtgctggatgtctggctggtgatggggctgcatatgaacgtgcagggcgcggcgctggcgacggttattgcggaatatgcaacattgctgattggtctgctaatggtgcgtaaaatcctcaaactacgcggaatttccggcgaaatgctgaaaactgcctggcgaggaaacttccgtcgcttgctggcgcttaaccgcgatatcatgctgcgtagcctgttgttgcaactctgtttcggcgcgatcaccgtacttggcgcgcgactggggagtgacattatcgctgttaacgcggttctgatgacgctactcacctttaccgcctatgcgctggatggttttgcctacgcggttgaagcgcactccggtcaggcatacggtgcgcgcgacggtagccagttgctggatgtctggcgggcagcgtgccgccagagcgggatcgtagcgttactgtttagcgtggtttatttgctggctggggaacacatcattgcgttactgacgagcttaacccagattcagcagctggctgaccgctatcttatctggcaggtgattttgccggtggttggcgtctggtgttatctgctggacggcatgtttataggcgcaacgcgtgccaccgaaatgcgtaacagtatggcggtggccgccgcaggttttgcgctgacgctccttacgctgccgtggctgggtaatcatgctttgtggctggcattaaccgtctttctggcgttgcgcgggctttctctggcggctatctggcggcgtcactggcgcaatggtacctggtttgccgcaacgtgacggttaaaaattctgaataaataatcctaagccaaattgctgactacacttaatctcacgttcagaagaaaagtgaacgtactctcattcacaacctaacgatgaggtcttgattatgaataaagatgaagccggcggtaactggaaacagtttaaaggtaaagtgaaagagcaatggggcaaactgaccgatgatgatatgacgatcattgaaggtaaacgtgatcaactggtcggtaaaatccaggaacgttatggttatcagaaagatcaggcagaaaaagaggtcgtggattgggaaacccgcaatgaatatcgctggtaattaatccctcctgcccgacgtgtacaaggatgtacgccctcttaacgcggtttctttttcacctgcacagagtgatcatgctggcactgttcaggatgacgacacgcttccacttctacacatgccgcacagagcccatgtgcttcaatcacattatgccgcagggcaaaccccatttttgccgccagcgtatgcataatgtcttccacgccttctgcacactcttctttcactgcgccgcagcgatcgcaaataaacatggcactcgtatgggtgggctgatcgaacagatgacagagcacataactgttggtggattccaccttatgcacaaaaccttgctcaagcagaaaatccagcgcgcgataaaccgttggcggcttggcttgcggttcagcttcgcgcagtaaatcaagcagatcataagcgctgatagcgccatcctgcagactcatcaggcgcaacacttccaggcgctgtggggtcaggcgcacattacgctgcgcgcagattttttcagcctgcgctaataactcctgcgttgtggtcttttccatcgggcacctcaaagtgggggttaagaatgtccttactttaccatgttccaggaaaaacaccgagaacccttattgttgccgtaatgttgattttctgctttgtaggtaaggtgttatgttgccttgtcgtaccattatcaacacgataataattaataattcatttttaaataaattgcttcaagttaactcgctatttatttaactgggtttaaacgcatacctgtagttcagaaattatgagcgatttttgatagtgaccagatggcaaaagaattataaggaggacacggtacgacaaaaaaggtagatgaatcatgttgaagataatacccggtgcaactggatactttaataaaacactcaatagtaatcaattcgataatgaagatgcaatcaaagataaattagataatagaggtagtatcaaaggtaaattaaataatatatatggtaaatctattgattatgcagcgctgcgtcatcgggatataattattgcaaaaatagatttgtttattcaacgaatcacgcataatttatggcatgcacgtaaaaaaatgtgtttttaattgtgcaaataaatgatctcaaaatgtgggtcaataagtatattgacgattgcactgatgaggatttaaacgatcgtgactttattgcaagtgttgttgaccgggctatttttcatttcgcgattaatagtatatgtaatcctggggataataaagatgcaatgcccattgaacaatgtacttttgatgtagaaactaagaatgaccttccctccacggttcagctattttatgaggaatctaaggataatgaacctttagcgaatatacattttcaagcaataggttctggttttttaacgtttgttaatgcctgccaggaacatgatgacaacagcttaaaattatttgctagcctgttaattagtcttagttattctagtgcctacgcagatttaagtgaaacagtgtatattaatgaaaataatgagagctacctgaaagctcagtttgaaaaattatctcaacgtgatatgaagaagtacctgggagagatgaagcgtctggctgatgggggagaaatgaattttgatggctatctggataagatgagtcatctggtgaatgaaggaacgctcgatcctgatattttaagcaaaatgcgagatgctgcaccacaattaattagcttcgcgaagagctttgacccaaccagtaaggaagagattaaaatacttacagacacttctaaattaatttatgatttgttcggggttaaaagcgagaaataatatgtgaagttcttcgatagtatggaaggcattatataaaaggacccaatatttattgggttcttttttctctatcaatactattagcagggagatatatcaccagagtttaatgtgtgattttttatttatcgtcgaacctggattgtttatcattggccttaacaaagttaacggctaataagattatttccatcacttcgtgagagcttcatgccttgagaggatctcaattttcttttgcaatgagacaggcgcttcctgttgttatggtatagtaccccgctattgagcctcctgaatagtgatgctgaataacataaccccatgatatatcgataaaataatctctacatttgaaaatgcacggtaattctgaaatgcaaaaaatcaaccaaaccagcgcaatgcctgaaaaaactgacgttcactggagtggtcggtttagcgttgcaccaatgctcgactggacggacagacattgccgctatttcttgcgtctgctttcccgcaatacgttgctgtataccgaaatggtgaccacaggggcgattattcacggtaaaggtgattatctggcgtacagtgaagaagaacatccggtagcgttgcaactgggcggtagcgatccggcggcgctggcgcagtgtgcaaagctggcagaagcgcgcggatatgatgagatcaacctgaatgtcggctgcccgtctgaccgggtgcagaacggcatgtttggtgcgtgtctgatgggtaatgcgcagctggttgccgactgcgtgaaagcgatgcgcgatgtggtgagcattccggtgacggtgaaaacgcgtattggcatcgacgaccaggacagctatgaatttctctgcgatttcatcaataccgtttccggcaaaggcgagtgtgagatgttcatcatccacgcacgtaaagcctggcttagcgggttaagcccgaaagaaaaccgtgaaatcccgccgctcgattatccgcgtgtgtatcaactgaagcgtgactttccgcatctgacaatgagcattaacggtggtatcaagagcctggaagaggccaaagcacacctgcaacatatggatggcgtgatggtcgggcgcgaggcgtatcagaatccgggtattctggcggcggtagaccgggagatctttggttccagcgataccgatgccgatccggtggcggtagtgcgcgccatgtatccgtacattgagcgtgaactcagccaggggacgtatctcggccatattacccggcatatgttgggcttgttccagggtattcctggcgcgcggcagtggcggcgttatttaagtgaaaatgcccataaagcgggtgcagacattaatgtgctggaacacgcgctcaaactggtggcggataagcgttaacttttcaccaaaaagtagtcaaattcaccacgccctgcgcaccgtcgcggggcgttttgctgttaaatcaatagattatttttggcatgattcttgtaatgccagcaagagatttcatatttgggagagcatcatgctggaactactttttgtgattggcttttttgtcatgctgatggtcaccggcgttagcttgctgggcattatcgccgcgctggttgtggcgacggccattatgttcctcggcggtatgctggcattgatgattaagttgctgccgtggttactactggcgattgcggtggtgtgggttattaaggcgattaaagcaccaaaagtgccgaaatatcagcgttatgaccgctggcgttactaagggattgtgcggatgatcacaacctaaggttttatccttagaacaaaataggaattaataatcaaatctgtcactattgcgcctctaacagattcatcgtgctgtaccctacatacagccgaactataaaaagaaagggcttcccaggtggaagccctatttcttttatggaatcagcaggctggaaccttgcgtcgcccggctttccagaatctcatgcgcacgctgcgcatccttcagcggatatttctgctgctcggcgacatcgaccttaatcacaccgctggcaatcaaagagaacagttcattactggcctcggttaattcctcccgcgtggtgatatagccttgcagggaagggcgtgtcacatacaagctgcctttttgattgagaatgcctaagttcacaccggtaaccgcaccactactgttgccaaaactgaccattaagccgcggcgttgcaggcaatccaggctccgttcccaggtgtctctgcccacggaatcgtacaccacgcgcactttcttaccgccggtgatctcttttaaccgctcgaccagatcctcttcacgatagttaataacctgccacgcgcccgcttttagcgcgctctgcgctttttgcgcggttcctacggtgccgataagtttcgcgcccagggcttttgcccactggcaggcaattaagccaacgccgccagccgctgcgtggaacaggaactgttcatcgggtttaatttcataggttttgcgcagcagataataaaccgttaagcctttcaggaaggatgccgcagcttgctcaaaagaaattgccgcaggcagaatcgccgctttatccgcaataatgttatgcacagagctgtaagcgcctaacgcgctctgcgcatagactacacgatcgcctgccttaatatgctttacaccactgccgactttactcacgatgcctgctgcttcggtgcctaatccgctgggtaggcttggcggcgggtaaaggccgctgcggatatatgtgtcgataaaattgatgccgatggctttattttcgacctggatttcattctccgccggatcggcaggagtgaactctacggcttgaagtacttccgggccaccgtgcttgtgaaattcaattcgtgttgccatgtgtcctccagaacgtatcgtcagggtctgcttcatatgataaagtttcgacccattctttatctcggtaactccattcactatggcaggaaataaacccttcaacaaacagcaggctgaaccccgcgaacgcgatccacaagttgccgggctgaaagtgcctccgcacagcatcgaagcggagcagagcgtgttgggcggtttaatgctagataacgaacgctgggatgatgtagccgagcgtgtggtagcagacgatttttacacccgcccacaccgtcatatctttactgaaatggcgcgtttgcaggaaagcggtagccctatcgatctgattactcttgcggaaagcctggaacgccaggggcaactcgatagcgtcggtggttttgcttatctggcagagctgagtaaaaatacgccaagtgcggctaacatcagtgcctatgcggacatcgtgcgtgaacgtgccgttgtccgtgagatgatcagcgttgcgaatgagattgccgaagctggttttgatccgcaggggcgtaccagcgaagatctgctggatctggctgaatcccgcgtctttaaaattgccgaaagtcgtgcgaacaaagacgaagggccgaagaacatcgccgatgtgctcgacacaaccgtggcgcgtattgagcagttgtttcagcagccacacgatggcgttaccggggtaaacaccggttatgacgatctcaacaaaaaaaccgctggcttgcagccgagcgatttgatcatcgtcgccgcgcgtccgagcatgggtaaaacaacatttgcgatgaacctcgtcgaaaacgcggcgatgttgcaggataaaccggtacttatcttcagcctggagatgccaagtgaacagatcatgatgcgttctctggcgagcctgagccgcgttgaccagactaaaatccgtaccgggcagctcgatgacgaagactgggcgcgcatttccggcaccatgggtattttgctcgaaaaacgcaatatctatatcgatgactcctccggcctgacgccaacggaagtgcgttcccgcgcacgccgtattgcccgtgaacacggcggcatcgggcttatcatgatcgactacctgcaactgatgcgcgtaccggcgctttccgataaccgtacgctggaaattgcagaaatctctcgcagcctgaaagcactggcgaaagaactgaacgtgccggtggtggcgctgtcccagttgaaccgttctctggaacaacgtgccgacaaacgcccggtcaactccgacctgcgtgaatctggctctatcgagcaggatgcggacttgatcatgtttatctatcgtgatgaggtgtatcacgaaaacagtgatttaaaaggcatcgcggaaattattatcggtaaacaacgtaacggcccaatcgggacggtacgcctgacctttaacggtcaatggagccgcttcgacaactatgcggggccgcagtacgacgacgaataataattattttatgaattaggtaattaaagcaaacacttatcaaggaacacaaatgcaagcggcaactgttgtgattaaccgccgcgctctgcgacacaacctgcaacgtcttcgtgaactggcccctgccagtaaaatggttgcggtggtgaaagcgaacgcttatggtcacggtcttcttgagaccgcgcgaacgctccccgatgctgacgcctttggcgtagcccgtctcgaagaagctctgcgactgcgtgcggggggaatcaccaaacctgtactgttactcgaaggcttttttgatgccagagatctgccgacgatttctgcgcaacattttcataccgccgtgcataacgaagaacagctggctgcgctggaagaggctagcctggacgagccggttaccgtctggatgaaactcgataccggtatgcaccgtctgggcgtaaggccggaacaggctgaggcgttttatcatcgcctgacccagtgcaaaaacgttcgtcagccggtgaatatcgtcagccattttgcgcgcgcggatgaaccaaaatgtggcgcaaccgagaaacaactcgctatctttaataccttttgcgaaggcaaacctggtcaacgttccattgccgcgagcggtggcattctgctgtggccacagagccattttgactgggtgcgcccgggcatcattctttatggcgtcagcccgctggaagatcgctccaccggtgccgattttggctgtcagccagtgatgagtctaacctccagcctgattgccgtgcgtgagcataaagccggagagcctgttggttatggtggaacctgggtaagcgaacgtgatacccgtcttggcgtagtcgcgatgggctatggcgatggttatccgcgcgccgcgccgtccggtacgccagtgctggtgaacggtcgcgaagtaccgattgtcgggcgcgtggcgatggatatgatctgcgtagacttaggtccacaggcgcaggacaaagccggggatccggtcattttatggggcgaaggtttgcccgtagaacgtatcgctgaaatgacgaaagtaagcgcttacgaacttattacgcgcctgactagtagggtcgcgatgaaatacgtggattaatcgttctgtaatatttgattgtctgtgccggatgcggcgtgaatgccttatccggccaataaaatcctaaaaattcaataagttgatgttctttcatgctcttataaaggtcgtgcctctggcggatgtacgtttgtcatgagtctcactctgttgctaattgccgttcgctcctgaacatccactcgatcttcgccttcttccggtttattgtgttttaaccacctgcccgtaaacctggagaaccatcgcgtgtttcaaaaagttgacgcctacgctggcgacccgattcttacgcttatggagcgttttaaagaagaccctcgcagcgacaaagtgaatttaagtatcggtctgtactacaacgaagacggaattattccacaactgcaagccgtggcggaggcggaagcgcgcctgaatgcgcagcctcatggcgctagcctttatttaccgatggaagggcttaactgctatcgccatgccattgcgccgctgctgtttggtgcggaccatccggtactgaaacaacagcgcgtagcaaccattcaaacccttggcggctccggggcattgaaagtgggcgcggatttcctgaaacgctacttcccggaaagtggcgtctgggtcagcgatcctacctgggaaaaccacgtagcaatattcgccggggctggattcgaagtgagtacttacccctggtatgacgaagcgactaacggcgtgcgctttaatgacctgttggcgacgctgaaaacattacctgcccgcagtattgtgttgctgcatccatgttgccacaacccaacgggtgccgatctcactaatgatcagtgggatgcggtgattgaaattctcaaagcccgcgagcttattccattcctcgatattgcctatcaaggatttggtgccggtatggaagaggatgcctacgctattcgcgccattgccagcgctggattacccgctctggtgagcaatagcttcagcaaaattttctccctttacggcgagcgcgtcggcggactttctgttatgtgtgaagatgccgaagccgctggccgcgtactggggcaattgaaagcaacagttcgccgcaactactccagcccgccgaattttggtgcgcaggtggtggctgcagtgctgaatgacgaggcattgaaagccagctggctggcggaagtagaagagatgcgtactcgcattctggcaatgcgtcaggaattggtgaaggtattaagcacagagatgccagaacgcaatttcgattatctgcttaatcagcgcggcatgttcagttataccggtttaagtgccgctcaggttgaccgactacgtgaagaatttggtgtctatctcatcgccagcggtcgcatgtgtgtcgccgggttaaatacggcaaatgtacaacgtgtggcaaaggcgtttgctgcggtgatgtaatgcaggaaagcaggctggagctacccagcctgcagtgaaattaaactgtcgtcgctttcactctttctttatagatgatttttttgatgccatcgttctacgtgagagataataaacgttgttagttcttttattgttaagcttatcccaattatctggaattccttatcctgtttttttgggtggagtaataatttctgcacatctaaccattattaaatttaataataagtatcgggtttgttacgatagaatatttctatatcctcaagaatatgctttgccttattgcctgtgactttctgagattcaattatagtatcgttaaattctaatgttaaagagaactcttttttccgctttgtgtaagtttaaccttatattgattaccaatatcaaataaaaaggtcctgtaatgagaataatcacctttaacctcctcggcaaaacagcaaagcgtgcaaatatacataaagtctttcttacccctgattttgttaactaaatcaataaatgcgtgaaaaactttacttgcaatagaacttgatacttcttctccaggtctaaaaaatcttttgcaatttttaactgtgtttctatgtataaaaagaaatctttggcataagagatatctttattatttagtgcatctagctcaacaggtaaagatgtcgttttgttgctattcacatatgatatattcatatcatcatctccatcgcgagtaataaaattaatcaccattgtagggtagggggctggtcaatcagaaatcatctttataaacttcgattgtttttgtaatgctgtatcattaagttcattaaatcgtacagcagataaatgttctatcaaatttcgctcatttgccgaggattcatcataataaacgtaaaattaatgtatccttacatcgagtaataaacattttttatacaaaaaaagacaggaacgtatttactgggttaaatataatcatcctgcttttcatcacaaaaaccgcagataatccttcctttccccggcagctggcgttatggtcagatggtttttgcaacaaatctcacaataaaaagtttcaacatactgactatttagggaaaaatatgcgcaagatcacacaggcaatcagtgccgtttgcttattgttcgctctaaacagttccgctgttgccctggccagttctcctagtccgcttaaccctgggactaacgttgccaggcttgctgaacaggcacccattcattgggttagcgtcgcacaaattgaaaatagcctcgcagggcgtccgccaatggcggtggggtttgatatcgatgacacggtacttttttccagtccgggcttctggcgcggcaaaaaaaccttcagcccagaaagcgaagattatctgaaaaatcctgtgttctgggaaaaaatgaacaatggctgggatgaattcagcattccaaaagaggtcgctcgccagctgattgatatgcatgtacgccgcggtgacgcgatcttctttgtgactggtcgtagcccgacgaaaacagaaacggttagtaaaacgctggcggataattttcatattcctgccaccaacatgaatccggtgatctttgcgggcgataaaccagggcaaaatacaaaaagccaatggctgcaggataaaaatatccgaattttttatggcgattctgataatgatattaccgccgcacgcgatgtcggcgctcgtggtatccgcattctgcgcgcctccaactctacctacaaacccttgccacaagcgggtgcgtttggtgaagaggtgatcgtcaatagtgaatactgacagagcgggagagcgtgatgctctcccgaatgctgtttttttaatcacacctttatcctttcgctgtcttgctgcaaactgattaagagagttttatcaaggagcagcacatgtggtatcaaaagacgctcacgcttagcgccaaatctcgtgggtttcatctggtaacggatgaaattctgaatcagctggctgatatgccgcgcgttaacatcggcttactgcatctgttgctgcaacatacctccgcctctctgacacttaatgagaactgcgatcccaccgtacgccacgacatggagcgttttttcctccgcaccgttcccgacaacggaaattatgagcatgactatgagggagcagacgatatgccttctcatatcaaatccagtatgctgggaacaagccttgtattgccggtgcataaagggcgtattcagaccggcacctggcaaggcatttggctgggggaacatcgcatccacggcggaagccgtcgcatcatcgcgacactacaaggggagtaaaaaatgaccattagcgagttgctacaatattgcatggcaaaaccaggcgcagaacagagcgtgcataatgactggaaagcgacgcagatcaaagtggaagatgtactgtttgcgatggtgaaagaagtagaaaatcgcccagctgttagcctgaaaaccagcccggagctggcggagctgctacgtcagcagcacagcgatgtgcgtccaagccgccatctgaataaagcgcactggagcaccgtgtatctcgacggtagcctgccagatagccaaatctattatctggtggatgcgtcttatcagcaggcggtgaatttactgccggaagaaaaacgtaaattgctggtgcaactctgaaaggaaaaggccgctcagaaagcggccttaacgattacagcatcggcttaaggaagcgtgccgtgtgacttgcttcgcactccgcgacggtttctggcgtaccggagacgaggatctcgccgccaccactgccgccttctggtcccaggtcgacaatccagtcagcggttttgatcacgtcgagattgtgctcaatcaccacaatggtgttgccctgatcgcgcagtttatgcagtacgtcgagcagttgctgaatatcggcgaagtgcagaccggtggtcggctcgtcgagaatatacagcgtctgcccggtgccgcgtttactcagttcacgcgccagcttcacgcgctgggcttcaccgccactaagggtggttgcggactgccccagtcgaatgtacgtcaggccaacgtccatcaacgtttgcagcttacgcgccagtgcaggtacggcatcaaagaactcacgcgcctcttcgatggtcatatccagcacttcgtggatggttttgcctttgtacttaatctccagcgtttcacggttatagcgtttacctttgcactggtcgcacggcacgtagatatccggcaggaagtgcatctccactttgatcacgccatcgccctgacaggcctcgcagcgtccgccacgaacgttaaagctgaaacgtcccggcgtatagccgcgcgcacgggattccggtacgcccgcaaacagttcgcgcacaggcgtaaacacgccggtataggtcgccgggttagaacgtggagtacgaccaattgggctttggtcgatatcgatcactttatcgaaatgctccagcccctgaatatcgcgatacggtgctggttcggcgatggtcgccccattcaactggcgttgggcaatcgggaacagtgtgtcgttaatcagcgtgcttttaccggaaccactaaccccggtgatgcaggtaaacagacccaccggcagcgtcagcgtcacgtccttcaggttgttgccgcgtgcgcctgtcagcttcagcactttttccggattcgccggaacgcgtttcttcggcacttcaatcttgcgtttgccgctcatgtactgcccggtcaagctctccggcaccgccataatcgcttccagcggaccttctgcgaccacttcaccgccgtgaacacctgcgcccgggccaatgtcgatcacatggtcagcggcgcgaattgcgtcttcgtcgtgctccaccacaatcacggtattaccgagatcgcgcagatggataagcgtacccaacaggcgctcgttatcacgctggtgcaggccgatagacggctcgtccagcacgtacataacgccaaccaggcccgcaccaatctggctcgccagacggatacgctgtgcttcaccgccagaaagcgtttctgcgctgcgggaaagcgtcaggtaattcaggccgacgttaacgaggaatttcagacgatcgccgatctctttaaggattttttctgcaatcttcgcccgctgacctgcgagtttgagattgttgaagaattccatcgcatgaccaatgctcatgtcggagatagcaggcagcggcgtattctcgacatacacgtggcgcgcttcccgacgcagacgcgtcccttcgcagctggcgcacggacgattactgataaacttggctaattcttcgcgtaccgcgctggattccgtctctttatagcggcgctccatattatgcagcacgccttcgaacggatgacgacgaatggaggtatcgccacgatcgttcatgtatttgaattcaatgttttctttgccagaaccgtacaacaccactttatgcacgttcgcgctcaggctgccccacggcgcttcgacgtcgaacttatagtgatctgccaggcttttcagcatctggaaataatagaagttgcggcgatcccagccacggatcgcaccaccagccaggctcagttccggattctggatcactcgatcaggatcgaaatattgctgtacgccaaggccgtcgcaggtcgggcaggcccccgccgggttgttaaagctaaacagtcgcggctccagttcacgcatactgtagccgcaaattgggcaggcgaagttggcggagaacagcagctcttccgctttcgggtcgtccatatccgccactaccgcggtaccaccggaaagctccagcgcggtttcaaaactctcggcaagacgttgggtaagatcgtcacgcaccttgaagcgatcaaccaccacttcaatggtatgtttcttttgcagttccagttttggcggatcggaaagatcgcagacttcgccatcaatacgagcacggatgtagccctggcttgccaggttctccagcgttttggtgtgttcgcctttgcgctctttaatgattggcgcgagtagcatcagacgcttgccttccggctggctcagcacgttatccaccatctggctgacggtttgcgccgccagcgggacgtcgtggtccggacagcgcggctcgccaacgcgggcgaataacaaacgcaaatagtcgtggatttcggtgattgtccccaccgtagaacgcgggttatgagacgtgcttttctgctcaatactgatggcaggagaaagcccctcaatatgatcgacgtccggcttttccatcagactcagaaactgccgcgcgtaggcggaaagggattcaacgtaacggcgctgcccttcggcatataaggtgtcgaaagcgaggctggatttgccagaaccgctaagcccggtcacgacaatgagcttgtcgcgggggataacgaggttgatgtttttgagattatgggtgcgggcgccccgaacttcgatcttatccattcacctttcccggattaaacgcttttttgcccggtggcatggtgctaccggcgatcacaaacggttaattatgacacaaattgacctgaatgaatatacagtattggaatgcattacccggagtgttgtgtaacaatgtctggccaggtttgtttcccggaaccgaggtcacaacatagtaaaagcgctattggtaatggtacaatcgcgcgtttacacttattcagaacgatttttttcaggagacacgaacatggccagcagaggcgtaaacaaggttattctcgttggtaatctgggtcaggacccggaagtacgctacatgccaaatggtggcgcagttgccaacattacgctggctacttccgaatcctggcgtgataaagcgaccggcgagatgaaagaacagactgaatggcaccgcgttgtgctgttcggcaaactggcagaagtggcgagcgaatatctgcgtaaaggttctcaggtttatatcgaaggtcagctgcgtacccgtaaatggaccgatcaatccggtcaggatcgctacaccacagaagtcgtggtgaacgttggcggcaccatgcagatgctgggtggtcgtcagggtggtggcgctccggcaggtggcaatatcggtggtggtcagccgcagggcggttggggtcagcctcagcagccgcagggtggcaatcagttcagcggcggcgcgcagtctcgcccgcagcagtccgctccggcagcgccgtctaacgagccgccgatggactttgatgatgacattccgttctgatttgtcattaaaacaataggttatattgttttaaggtggatgattaaagcatctgccagccataaaaaagaagcctccgttatggaggcttctacgtatcaggtcaaaatcattggccattgtggcggtgtctgattcatctcttctatcatcacgctctcgatgttgtgccagatagcggtgatgtccgccattgtgatgccaagcaaccccattgcgaaccaacaggcggaaacaacgcccagaccgctgctgatcaccgcaagcccgacataatcagaccgacgaaaacggatgttgagtgtgctggccagaaacatcattacggcactaagaagttgccagcgaagaagaaccacgccagtggtgagggtagccatcaaacaattcctctgaaaagagccgatgccctggacagcgcggcgttgttcacgggaggcgtggtacactctggctatcgcggggcttgcagaacacaaaaatgaaacactctgtttgtttcattaattttgtgaactatatcacaattgattgtttgttagccatattaggccgtgacttttattgctgtacagattatgtggtttttcagtggcattaagggcatatcttcccgccgcctctgcattcctgtaggaaattaattttgaatatcaatgaattattttcatccaggtgacgattagaaaggtatcaatttcaaatcaggcaaaagtgctatttataccgtaagatttatctaaagacgtcggtacccagggttttcaccttgcaatggccgggtataaacaggcaggaaattgatagcaatgagtcatcgtgcacgacaccaattactggcgttgccgggcattatctttttagttctctttcccatcattcttagcctatggattgccttcctttgggcaaaaagtgaagtgaataatcagctccgaacctttgctcaactggcactggataaatccgagctggtcattcgccaggcagatttagtgagcgatgcagctgaacgctatcaggggcaagtttgcactccagcccatcaaaagcgaatgttgaatattattcgtggctatctttatattaatgaattgatctatgcccgtgataaccattttttatgcagtagcctgatagcgcctgtaaacggctatacgattgcaccggccgattataagcgtgaacctaacgtttctatctattattaccgcgatacgccttttttctctggctataaaatgacctatatgcagcggggaaattatgtggcggttatcaaccctctcttctggagtgaagtgatgtctgatgacccgacattgcaatggggtgtgtatgatacggtgacgaaaacctttttcagcttaagcaaagaggccagcgcagcaacgttttctccgctgattcatttgaaggatttaaccgtacaaagaaatggctatttatatgcgacagtttatagcacaaaacgcccaattgcagccattgttgcgactagttatcaacgtcttataacccatttttataatcatcttatttttgcgttgcccgccggtattttggggagtcttgttctgctattactctggctacgtattcgacaaaactatttatctcccaaacgtaaattgcaacgcgccctcgaaaaacatcaactttgtctttattaccagccaataatcgatatcaaaacagaaaaatgtatcggcgctgaagcgttgttacgttggcctggtgagcaggggcaaataatgaatccggcagagtttattccgctggcagaaaaggaggggatgatagaacagataactgattatgttattgataatgtcttccgcgatctgggcgattacctggcaacacatgcagatcgctatgtttctattaacctgagcgcctccgattttcatacgagtcggttgatagcgcgaatcaatcagaaaacagagcaatacgcggtgcgtccgcagcaaattaaatttgaagtgactgagcatgcatttcttgatgttgacaaaatgacgccgattattctggctttccgccaggcaggttacgaagtggcaattgatgattttggtattggctactctaacttgcataaccttaaaagtttgaatgtcgatattttgaaaatcgacaaaagctttgttgaaacgctgaccacccacaaaaccagtcatttgattgcggaacacatcatcgagctggcgcacagcctggggttaaaaacgatcgctgaaggcgtcgaaactgaggagcaggttaactggctgcgcaaacgcggcgtgcgctattgccagggatggttctttgcgaaggcgatgccgccgcaggtgtttatgcaatggatggagcaattacccgcgcgggagttaacgcgcgggcaataaaattacaggcggtggcgataatcgctgggagtgcgatcaaactgccgacggaaaacgcgggagaaggtctgctggctgacataacccaggtccattgcgatatcaaaaatcggacgctcggtggtgcgcaactcaacggcggccagtaacaggcggcgttggcgaatgtaatcgccaagcgtctgatgcgtcaccgtgcggaacattcgttgcaagtaccacttactatagccacttttttttgcgactacatcaatgttaagcggctggtcaatatgctcgtcaatccatgcgataagatcctgaataattttctgatgggacataaatctgcctcttttcagtgttcagttcgttaattcatctgttggggagtataattcctcaagttaacttgaggtaaagcgatttatggaaaagaaattaccccgcattaaagcgctgctaacccccggcgaagtggcgaaacgcagcggtgtggcggtaagcgcgctgcatttctatgaaagtaaagggttgattaccagtatccgtaacagcggcaatcagcggcgatataaacgtgatgtgttgcgatatgttgcaattatcaaaattgctcagcgtattggcattccgctggcgaccattggtgaagcgtttggcgtgttgcccgaagggcatacgttaagtgcgaaagagtggaaacagcttagctcccaatggcgagaagagttggatcggcgcattcataccttagtggcgctgcgtgacgaactggacggatgtattggttgtggctgccttagccgcagtgattgcccgttgcgtaacccgggcgaccgcttaggagaagaaggtaccggcgcacgcttgctggaagatgaacaaaactaaagcgccacaagggcgctttagtttgttttccggtctttgtctttctctctatcccgctggtacacaggagggtttcccccgacgtcaacacacctcattcgagcacgtggtggaggttccggttggtgttgatgctttaattgtatgtcaccgacgtttcttcgccagtgtaaaagtatactttttaaccgcaatatttttgtcatctcagacgattttttatcgcaatcctgaacggtatacggctcgataacgctgcaatcttgcgcaccgacgataacgtttgcgcatcaattgcctggtttttcatcgtcaagacaataaaagagaaaaaagcagcaaacttcggttgaaaaagccgctatgatcgccggataatcgtttgctttttttaccacccgttttgtatgcgcggagctaaacgtttgcttttttgcgacgcagcaaattgtcgcaaacctggagcaggaagataacgtttcgctggcaggggattgtccgccacgcatcttgacgaaaattaaactctcaggggatgttttcttatgtctacgccaagtgcgcgtaccggcggtagtctcgacgcctggtttaaaattagtcaacgtggaagcactgtccgtcaggaagtggttgccgggttaacaacgtttctggcgatggtctacagcgtcatcgtcgttccaggtatgttgggtaaagcaggcttcccgcctgcggcagttttcgttgcaacctgtctggttgccggactcggttctatcgtgatgggtctgtgggctaatctgccgttggcgattggttgcgccatctccctgacagcgtttaccgcattcagcctggtgctggggcaacatattagcgtacctgtcgcgctgggtgccgtgttcctgatgggtgtgctgtttacggtaatttctgccacgggtatccgtagctggattttgcgcaacttgcctcacggtgtggcgcacggcacggggattggtatcggtctgttcctgctgctcattgccgctaacggtgtcggtctggtgattaaaaacccgcttgatggtctgcccgttgcgctgggtgatttcgcgaccttcccggtgattatgagtctggtaggtctggcggtgatcatcggcctggaaaaactgaaagtccctggtggcattctgctgaccattatcggtatcagtattgtcggtttgatcttcgatcctaacgtccatttctccggcgttttcgccatgcctagtttgagcgatgaaaacggcaatagtctgattggcagcctggacattatgggcgcgctgaatcctgtagtcctgccaagcgttctggcgctggtgatgacggcagtatttgatgccaccggaactatccgtgccgtcgccggccaggcgaacctgctggataaagatgggcagatcatcgacggtgggaaagcactgaccactgactccatgagcagcgttttctctggcctggtgggtgcggctccggcagcggtatacatcgagtctgcggcgggtacggcggcgggcggtaaaaccggtttgacggctatcaccgttggcgtgctgttcctcctgattctgttcctctctccgctctcttacctcgttccggggtatgcaacggctccggcgctgatgtacgttggcctgctgatgctgagcaacgtggcgaaaatcgactttgctgattttgttgatgcgatggcgggtctggttacggctgtattcatcgtgctgacctgtaacatcgtaacaggcatcatgatcggcttcgcgactctggtgattggtcgtctggtttccggcgaatggcgcaagttgaacatcggtacggtcgttatcgccgtggcgctggtgaccttctatgcgggtggctgggctatctaatctttcatcggattctgaaaacgggtggcaatggctgcccgtttttattttctccgcacattgtgtgagcttttgcgatattctgaaaaaaatgagaattcaggcataacgtctttctcagatcataaaaaacatcgcaaacagggaacgcatggaaatcttcttcaccatactgataatgaccctcgtggtcagcctgtccggggtggtcactcgtgtcatgccctttcagatcccgcttccgcttatgcaaatcgccatcggtgcgctactggcgtggccgacgtttggtttgcatgtggagtttgatcctgaactctttttagtcttgtttatcccgccgttgctgttcgctgatggctggaaaacgccgacccgtgaatttctcgaacatggtcgagagattttcggcctcgcgctggcgctggtggtggtcaccgtggtcggcattggcttccttatttactgggtggtgccgggcattccgctgatccctgcctttgcgctggcggcggtgctttctccgaccgatgctgtggcgctctccgggattgttggcgaagggcgcatcccgaaaaaaatcatgggcattttgcagggcgaagcgttgatgaatgacgcctccggtctggtgagcttgaagtttgccgtagcagtggcgatggggacgatgatcttcaccgtcggcggtgcgacggtcgaatttatgaaagtagccattggcggtattctcgccggttttgtggtgagctggctgtacggtcgcagcctgcgattcctcagccgctggggcggtgatgaacccgcgacgcagatcgtcctgctgttcctgctgccattcgcttcttatctgattgccgaacatattggcgtttccggcatcctcgctgcggttgccgccgggatgaccatcacccgctccggtgtgatgcgccgtgcgccgctggcaatgcgcctgcgtgcaaacagcacctgggcgatgctggaatttgtctttaacggcatggtgttcctgctgttaggtctgcagctgccgggtattctggagacgagcctgatggcagcagaaatcgaccctaacgtcgaaatctggatgctgtttaccaatattattctgatatatgcggcgctgatgctggtccgtttcggctggctgtggacgatgaaaaagttcagcaaccgcttcctgaagaagaagccgatggagtttggtagctggaccacacgagaaatcctgatcgcgtctttcgccggggtgcgtggggcgatcactctggccggtgtgctctctatcccgctgctcttgccggatggtaacgtcttcccggcgcgctatgagctggtgttcctggcggctggcgtcattctcttcagcctgtttgtcggcgtggtgatgttgcctattctgctacaacacattgaagtcgcggatcatagccaacaattgaaagaggaacgtattgcgcgagcggcaacggcagaagtggcgattgtggcgatccagaaaatggaggagcgtctggcggcggataccgaagagaatatcgataaccagctgcttacggaggtcagttctcgcgtcattggtaacctgcgtcgtcgcgccgatggacgtaacgacgttgaaagttccgtgcaggaagagaaccttgagcgtcgcttccgtctggcggcattgcgttctgaacgtgctgaactttaccacctgcgcgccacacgggagatcagcaacgaaacgctgcaaaaattactgcacgatctcgatttgcttgaagcgttgctaattgaggaaaatcagtaagccgaaagcgacgtaaccaggcccgaggtaatctgaaaaaggtgcaatcttttgcacctttaacaggttagctcgggctaacattcatgattctaaaacaaataaattatctctcttttaaagtcaattcattggctgttcttcgacttaacctcaatctgcatcttgcataatatctgcagtaatcttcatagcgactgcatgaagattatcctcagtttgactcatgccagtatgagtggcacaatcttcttcaaagaatttctgtagtgttaccaggatatcactattaatggagatattttcctcaccacggagaatggtaatacccattccctggacgctagcctcatcgaaattaacacgatagagacggatattaaacatccaggcttttgttaaaacagaacagttgaaatggcaattgcttaaattggcattattaaaattaacattagccatattagagtcggtacatataaccatttcgaggaacgtatttgttaaccgcgtaaaaaagagtttgctatcaattaagtttatattctggagggttgctttattcaggttgacacgagacagatcagcatgttcaaagttaattaaatcaagtttagagaagctaaggtcggctctaaataaattaatatatggcgctattactttataaagatttacctcagccatgtatgccatataaaaattactataatcaaggaaggtatttttaatattggctctattcattgttgcattgtagaattgaacatgcatagcggaacaactatttagagttccgtcagtcatttttatctgagcgaaattactgtcatcgagaatacaattatcaaaaagtattttttccattatggcgaaattaaaattcgttttatacatattacagtcctgaaaaatagcgttttgtagtctgcaacctgcaaaattgctattggataaatcttcatctttaatcacgatacctttcaggctaaggtgactaaaatcgtaaccaccatttactgtctgtgggatttcgatagtattattatggacggtgacattatttataaaatataccaccttaatactcacttccttatctttattaaggtaaactcttctcgtaattctatcgtcacatttattatttgcatgactagctatatctataaaatatttatgtattttcctgtccgtttctttcgtgatttttccacttggtaaactatcataaattcttttcattttctgaatcaagcctatcactttttcatgatcatccattttgaaaagagagagggctttattgtcaattaacgtgtttttatgatgtttgctgtaattatcactttttgttttctttgtatgacttggacttgtgacagagtggttatcgttaatcaggcaaagagggaaaaacatattatttaaaccattatagcgcataaaatatccttataattaacaagaaagaaaaggcatattctctgcattatcattttctacgactgtcaaaaatcgctcattttttaatgagtttatttgtttaatattatgggaaaaggtgatgcatttgggagaggaagagtattccccggtcagacgaccggggaaggggagagattaatgcgcgcggccttgctcaacgccaaagccggtctgggagcggataaactgcgcgcggaacagttcacgctcacgcgcgccttccgcactgttatcggttgcgctgaagaaccagatgccgaggaatgccacggtgatagagaacagcgccgggtattcatacgggaagatggctttttcgtgaccaaggatctgtacccaaatcgtcgggccgaggatcatcagtactactgcggtaatcagccccagccagccacccatcatcgcgccacgcgtggtcagtttgctccagtacatagaaagcagaatgatcgggaagttacagctcgccgcgatggcaaacgccagccccaccataaaggcgatgttctgattctcaaacagcacgccgaggataatcgcaatcacgccgaggatcagtacggtgattttacttacccgcagctcttcacgttcggtcgcgccttttttgaagacgttagcgtacaagtcatggctaaccgcggatgcgcccgccagcgtcagacccgcaaccaccgcgaggatagtggcgaaagcaaccgcactaataaaaccgaggaacaggttgccgcccactgcattcgccaggtgaacggccgccatgttgttaccaccaatcagatggcccgccgcgtctttatattccggattcgcaccaaccagcatgatcgcgccgaagccgataataaaggtcagaatatagaagtagcccataaacccggtggcgtagaacacgctcttacgtgcttcgcgggcatcgctgactgtaaagaagcgcatcagaatgtgcggcaagcccgccgtaccaaacatcagtcccagacccagagagagcgcggagatcggatctttcaccagcccgcccggcttcatgatgtcgacacctttcgggtgtaccgccatcgcttcactgaacagattgttgaagctaaagccgacgtgtttcatcaccataaaggccataaagctggcaccgaacagcaacagcacggctttgataatttgcacccaggtggtcgccagcatgccgccgaacaggacgtacatcatcatcagcacgccgaccagcaccaccgcaatgtgatagttaaggccaaacagcagctcgatcagtttacctgcgcccaccatctgggcgataaggtaaagcgccaccaccaccagagaaccacaggcgctaagaatacgaatcggcccttgtttcagacggtaagaggccacatcggcaaaggtgtagcgccccaggttacgcagacgttcggcaatcaggaacaaaatgatcggccagcccaccaggaagcccaggctgtaaattaagccgtcatagccggaggtaaacaccagcgcggagatccccaagaaactggcggcggacatatagtccccggcaatcgccagcccgttctggaagccagtgatattgccgcctgcggtgtagtagtcgctacgagaacgtacgcgtttacttgcccagtaggtaatgccgagcgtaaacacgacgaaaatcaggaacataataatcgcctgccagttcgttggctggcgctctacggccccgctaatagcatccgcggcgttagctgcgaaagggagtgtggcggcaagcgccgtcagaactcttttcatgatgcttgtacctcatgcagttatttcaacttgcttgtacctcatgcaggacttcattattaagacggtcgaattcgccgttcgcccgccagatgtagataccggtgagaacaaaggagatcacaatcactccaacaccaattggaataccgcgtgtgacgctggtgttcggattcagcggcgtgcccagccagccgggcgcgaaggcgatcagtaaaataaagccgatataaactgccagcataataatgctcaggatggtggcaaaccgttgccgtttttcgactaactccctgaaatgcgcattgtcttctatccgctgataaatagtgccattcatcacagattctccagaggtaatgtagggattgttttaattcccgctcccttatgggagaaggttaacgctcgggtaacccttgccgaatgtaggccggataaggcgtttacgccgcatccggcaatcaatgcctgatgcgacgctgtcgcgtcttatcaggcctacaaaccgttaccgactcgcatcgggcaattgtgggttagcttggcatcgcgatagcctgcttctcttcaagcagcttctcgactacgccaggatcggcaagcgtgctggtatcgcccaggttgctggtatcgcccgccgcaattttgcgcagaatacggcgcataattttgccggagcgggttttaggcagggagtcggtccagtgcagcacgtctggcgtcgccagcgggccaatctctttacgcacccagttgcggacttctgcgtacagttctggactcggttcctccccgtgattaagcgtgacgtaggcgtagatcgcctgacctttaatattgtgcggaatacctactacggcggcttcggcaatcttcggatgcgccaccagcgcgctctcaatctctgccgtccccagacggtgaccggagacgttcagcacgtcgtccacacgcccggttatccagtaatagccatcttcatcgcgacgcgcgccgtcgccgctgaaatacatatttttgaaggtggagaagtaggtctgttcaaaacgttcgtgatcgccaaacagcgtacgcgcctgacccggccaggagtcggtgattaccaggctaccttcggtggccccctccagcgggttaccttcgttatcgaccagcgccggttgcacgccgaagaacggacgtgttgcgctaccggctttcagctcggtagcgccaggcagcggggtgatcatgaaaccgccggtttcggtctgccaccaggtatcgaccaccggacatttctcgttgccgatttttttccagtaccactcccacgcttccgggttaattggctcgcccacggaaccgagaatgcgcaggctgctacggtcggtgccttcgatcgctttatcgccttccgccatcagcgcgcggatcgccgtgggtgcggtatagagaatattgacctgatgcttgtccaccacctgcgccatacgggcaggcgtcggccagttgggtacgccttcaaacatcagcgtggtcgcaccgcaggccagcgggccgtacagcaagtaactgtgtccggtcacccagcccacatcggcggtgcaccagtagatatcacccggatgataatcaaagacatatttaaaggtcagcgccgcgtacaccagataaccgccggtagtatgcagcacaccttttggcttaccggtagaaccggaggtgtagagaataaacagcggatcttcggcgttcatctcttccgcctggtgctgatcgctcgcttgctcaaccaggtcgtgccaccacaggtcgcgcccttcctgccagtcaattttcccgccagtacgcttcagtaccaccacatgctctacgctggtgacgttcgggtttttcagcgcgtcatcaacgtttttcttcagcggaatactgcgcccggcacgcacaccttcgtcggaagtgatcaccagtcgactgttggaatcaataatgcgcccggcaacggcttccgggctgaagccgccgaaaatcacgctatgcaccgcgccaatgcgggcgcaggccagcatcgcaaccgcggcttccggcaccatcggcatataaatcgccaccacatcaccttttttaatgcccagctcgagcagggtattggcgaagcggcagacgtcgcggtgcagctctttatagctgatatgtttgctctggctggcgtcgtcgccttcccagatgatggcggtacgatcgccgttttcttgcagatggcggtcaaggcagtttgccgccagattcagcgtgccgtcctcgtaccatttaatggacacattaccgggggcaaaggaggtgtttttcaccttctggtaaggtttgatccagtcaagaatttttccctgttcgccccagaaggtatcaggtacgttaatagattgttgatacatcgcctcgtactgctgagggtttatcaggcaacggtctgcgatgttggcaggaatggtgtgtttgtgaatttggctcatgcttttgttctccttgtaggatgttaataatatgtggcataagcgttaaatgtaggggtattggcagttttgtttagtatttgggcgacagatcacgcaaaagtagaattgtgcaaataaacggcagggtaatttttgaaggtcagcaacaaaagttgattaattctttgaggaacatgcagttatgcatgctgttgaaaaagaggaagatactgactaactctaaagtggtattttacatgcacttacaattgattaaagacaacattcacagtgtggttatttgttacacataggggcgagcaatgtcatgacagtgtaggtgcggttactgtcgtgaaaaacaataaaaaccgccattgcaacaatggcgcaattcggatgaagcccctatgacaaggataaaaataaacgcacgccgtatcttcagcttattgattccttttttctttttcacttctgttcacgctgaacaaacggctgctcccgcaaaacctgtaactgtggaagcgaagaatgaaacctttgccccgcagcatcccgatcaatatctctcctggaaagccaccagcgaacagagtgagcgtgttgacgccctggcggaagatccacggctggtgatcctgtgggcggggtatcccttcagccgcgattacaacaagccgcgtggacatgcttttgctgtgaccgatgtgcgtgaaaccctgcgtaccggtgcgccgaaaaacgctgaagatggtccgctaccgatggcatgctggagttgtaaaagcccggatgtggcgcgtctgatccagaaagacggcgaagatggctacttccacggtaaatgggcgcgcggcggtccggaaatcgtcaacaacttaggttgtgccgattgccataacaccgcctctccagagttcgccaaaggcaaaccgaagttaaccctttcccgtccgtatgcggctcgcgcgatggaagccattggtaaaccttttgagaaagccggacgtttcgaccagcaaagcatggtttgcggtcagtgccatgtggagtattacttcgacggcaaaaacaaagcggttaaattcccgtgggatgacggcatgaaagtcgaaaatatggagcagtattacgacaaaattgccttctctgactggactaactccctgagcaaaacgccaatgctgaaagcgcagcacccggaatatgaaacctggacagcgggcattcacggtaaaaacaacgtgacctgtatcgactgccatatgccaaaagtgcagaacgccgaaggcaaactctacaccgaccataaaattggtaatccgtttgataacttcgcccagacttgtgcgaactgccatacccaggacaaagctgccttgcaaaaagtggtcgcggaacgtaagcagagcattaacgacctgaaaatcaaggttgaagatcaactggttcacgctcacttcgaagcgaaagcagcgctggatgcaggcgcgacggaagctgaaatgaagccaattcaggacgatatccgtcatgcccagtggcgctgggatctggcgatcgcttcccacggcattcatatgcacgcaccggaagaaggtttacggatgctcggtacggcgatggataaagcggcggatgcacgcaccaaactggcgcgcctgctggcgaccaaaggcatcacccatgaaatccagatcccggatatcagtaccaaagagaaagcccagcaggccattggcctgaacatggaacaaatcaaggccgagaagcaggacttcatcaaaacggtgatcccgcagtgggaagaacaggcacgtaaaaacggtctgttaagccaataaccccgttccgcctcgcaaggggcggaaaacacaatggagtgaatatgagcgtattacgtagcttattaactgccggggtgctggcgagcggcctgttgtggagcctgaacggaattaccgctacccctgcggcgcaggcatctgatgatcgctacgaagttacccagcagcgtaacccggatgccgcctgtctggactgtcataaaccagataccgaaggtatgcatggaaaacatgcttccgttatcaacccgaataacaaactgccggtcacctgcaccaactgtcacggccagccaagtccgcaacaccgcgaaggggtgaaagatgtgatgcgctttaacgagccgatgtacaaggttggagagcagaacagcgtctgtatgtcctgtcatctgccggaacagttgcaaaaagcgttctggccgcacgatgtccacgtaaccaaagtggcgtgcgccagctgccattccctgcatccacagcaagatacgatgcagacgttaagtgacaaaggacggattaagatttgcgtcgattaccacagcgatcagcgcaccaatccgaactttaacccggcgtctgttccgttgcttaaggagcagccatgacctggtctcgtcgccagtttctcaccggcgtcggcgtgctggcagccgtcagcggcaccgcagggcgcgtggtggcgaaaacgttgaatatcaatggggtgcgttacggcatggtgcatgacgagagcttatgcatcggctgtaccgcctgtatggatgcttgtcgggaagtgaacaaggtgccggaaggcgtcagccgcctgacgattattcgtagcgagccgcagggcgaatttcctgatgtgaaatatcgcttcttccgtaagtcttgccagcactgcgatcatgcgccgtgcgttgacgtctgcccgaccggtgcgtcttttcgcgatgctgccagtgggattgtcgatgttaatccggatctctgcgtcggttgtcagtactgcatcgccgcctgtccgtaccgcgtgcgctttatccatccggtcacgaagacggcggacaaatgcgatttctgccgtaagaccaatttgcaggccggtaagttgcccgcgtgcgttgaagcttgcccgaccaaggcgctgacgtttggcaatctggacgatcccaacagtgagattagccaactgctgcgccagaagcccacttaccgctacaagctggcgctgggaaccaaaccgaagctgtaccgcgtaccgtttaaatacggggaggtgagccaatgacgcagacttccgcatttcattttgaaagcctggtgtgggactggccgattgccatctacctgtttttgattggtatttctgctggtctggtgacgctggccgtgctgttacgtcgcttctacccgcaggcgggcggtgcagacagtacgttgctgcgcaccacgctgattgtcgggccgggcgcggtgatcctcggtctgttgatcctcgtcttccacctgacaagaccgtggaccttctggaagctgatgttccactacagttttaccagcgtgatgagcatgggggtgatgctgtttcagctctacatggtggtgctggtgctgtggctggcgaaaatctttgaacatgatttgcttgccctgcaacaacgctggttgccgaagctggggatcgtgcaaaaggttctgagcctgctgacgcccgttcatcgcggactggaaacattgatgctggtgctggcggtgttgttgggggcttataccggctttctgctgagcgcgctgaaaagctatccgttcctcaataacccgatcctgccggtgctgttcctcttctccggcatcagctccggtgcggcggtggcgctgatcgccatggcgatacgccaacgcagtaacccgcattccacggaagcgcagtttgtacaccgtatggaaatccctgtggtatggggtgaaatcttcctgctggtggcgttttttgtcggtctggcgctgggcgatgacggtaaagttcgtgcgctggtggcggcattaggtggcggtttctggacgtggtggttctggcttggtgtcgccgggctggggctgattgtgccaatgctgctcaaaccgtgggtcaatcgcagttccggcattcctgccgtgctggcggcgtgtggggccagtctggtcggcgtgttgatgctgcgctttttcattctctacgccggacagttgacggtggcgtaagccagaaaagaggtggtttctggacgtattccttcctgaagtcggttttctggcgttgttgttaagtctcggggtcaacgtgttgaccccgttgacggccttcgcgggagtgcggttgcgctggcctgccatgatgcgactcacttgcatcggcattctggcgcagttcgcgctcctgctgctcgcctttggcgtactgacgtattgttttctcatcagcgatttcagcgtcatttatgtcgcgcaacatagctatagcctgctgagctgggaactcaagctggcagcggtgtggggcggccatgaaggtagcctgctgctttgggtgctgctgctttccgcctggagcgcgctgtttgcctggcattatcggcagcaaaccgatccgctatttccgctgacgttagccgttttatctctcatgctcgccgcactgctactgtttgtggtgctgtggtccgatcccttcgtgcggatatttccaccagcaatcgaaggccgcgatctcaatccgatgctgcaacatcccggtcttatctttcatccaccgctgctttaccttggctatggcggtttgatggtagcggcgagcgtggcgctggcgagtctactgcgcggcgagtttgatggtgcctgcgcccgaatttgctggcgctgggcgttacctggctggagtgcattaacggcggggatcatcctcggttcctggtgggcctactgcgaactcggctggggcggctggtggttctgggatccggtggaaaacgcctctttattaccctggctttctgccactgcgctgctgcacagtttgtccctgacacgccagcgggggattttttgccactggagcctgttgctggcgatagttactctgatgctgagcctgctgggcaccttaattgtccgttctggcattctggttagcgttcatgcgttcgcgctggataacgtccgcgccgtgccgttgttcagcctgtttgcactgattagccttgcgtctctggctctgtatggctggcgagcgcgggacggtggcccggcggtgcattttagcgggttaagccgggaaatgttaatcctcgctacgctgttgctgttttgcgcagtgctactgatcgtgctggtgggaacgctttatccgatgatttacggcctgctgggctggggacgcctctccgttggcgcgccgtattttaaccgcgcgacgttaccgtttggtctgttgatgctggtggtgattgtgctggcgacgtttgtctctggcaaacgcgtgcagcttccggcgctggtagctcatgcgggcgtgctgttatttgccgctggggtcgtggtctccagcgtcagccgtcaggagatcagcctgaatttacagccgggtcagcaggtgacgctggcaggatacaccttccgttttgagtgcctcgatctacaagccaaaggcaattacaccagcgaaaaagcgatagtggcactgtttgaccatcagcaacgcattggtgaactgacgccggagcggcgtttttatgaagcacgccgtcaacaaatgatggaaccgagtattcgctggaacggcatccatgactggtatgcggtcatgggggagaaaactgggccggatcgttacgcttttcgtttgtatgtacaaagcggtgtgcgctggatctgggggggaggattgttgatgattgcgggcgcattgttaagcggatggcgggggaagaagcgcgatgaataaagggcttctcacgctactgctgttatttacctgttttgcgcacgctcaggtcgtagacacctggcaattcgccaatccgcaacaacagcaacaggcgttaaatattgccagccagttacgttgtccgcagtgccagaatcaaaacttactggaatccaacgcgccggtggctgtcagtatgcgccatcaggtttacagcatggtggcggaggggaagaacgaagtcgaaatcattggctggatgaccgaacgctacggagattttgttcgctataacccaccgttaacgggtcagacgctggtgttatgggcgctgccagtggtgttgttactgctgatggcactgatcctctggcgagtgagggcgaagcgatgaaacagcccaaaataccggtgaaaatgctgacaacactcacgatattgatggtatttctctgtgtcggcagttatctgttaagcccaaaatggcaggcggtacgtgcggagtatcagcgtcagcgcgatccgctacatcagtttgccagccagcaaaccccggaagcgcagcttcaggcattgcaggataaaatccgcgctaatccacaaaacagcgaacagtgggcgttactgggcgagtactatctgtggcaaaacgattacagcaatagcttgctggcgtaccgtcaggcgttgcaactacgtggtgagaacgctgaactgtatgcggcgctggcgacggtgctttattaccaggccagccagcatatgaccgcccagactcgcgcaatgatcgacaaggccctcgcgctggacagtaatgaaatcaccgccctgatgctgctggcttccgatgcgtttatgcaggcgaactacgcgcaagccatcgaactatggcaaaaagtgatggatctcaacagtccgcgagttaaccgaacacagctggttgagagcattaatatggcgaaattgttgcagcggagattggattaatcatctggtgatgaagattatgtcattgagctgcataaaaaataatcgaatgaacatatgccaaaaataatcactaatcagtattattgcagattaaacaaataaaaatctttccataacaaatggttattcattaatcctgccataaactcgcgttattatgcattaatgcagcgaaaagctctgttgttaaagggttgcgcaacataccgcgcaaatgatactgatcataagcgttaaaaaaatctacaaaccaacgcaacacaattcatgccccggcagtatgtcacgttctcgcgtttctgaacggggaacggcgctccattgaggaagtcattcatatgaaaaatataaaattcagcctggcctggcagattctgtttgctatggtgctgggcattctcctgggaagctacctgcactaccatagcgacagccgcgactggctggtcgtcaatttgctctctccggcgggtgatatcttcatccatctgattaaaatgattgttgtgccgattgtgatctccacgctggtggtgggtatcgcgggtgttggtgatgccaaacagctcgggcgtattggcgcgaaaaccattatctacttcgaggtgatcaccaccgtcgccatcattttggggatcactctggcgaacgtcttccagcccggtgccggggtggatatgagccagttggcgaccgtcgatatcagcaaatatcagagcactacggaagcggtacaaagcagttcccacggcattatgggcacgattttgagcctggtgccgacgaacattgtggcgagcatggcgaaaggcgaaatgctgccgatcatctttttcagcgtgctgtttggtctggggctttcttccctgcccgcgacgcatcgtgaaccgctggtgaccgtgttccgctccatctctgaaaccatgtttaaagtgactcacatggtgatgcgttatgcaccggtgggtgtgtttgcgctgattgcggtgacggtggctaactttggtttcagctctctgtggccactggcgaaactggtgctgctggtgcatttcgccattctgttcttcgcgctggtagtgctgggaattgtggcgcgcctgtgcgggttaagcgtctggatcctgattcgtattctgaaagatgagctgattctggcgtactccactgccagctctgaaagcgtgctgccgcgaattattgagaagatggaagcctacggagcaccggtgagcatcaccagtttcgtggtgccgaccggttactcttttaaccttgatggtagcacgctgtatcaaagtattgccgctatcttcatcgcgcagttgtatggcattgacctgtccatctggcaggaaatcattctggtgctgacgctgatggtgaccagcaaagggattgctggcgtgcctggcgtgagctttgtggtgttgctggcaacgctgggtagcgtaggtattccgctggaaggtctggcgtttattgctggtgttgaccgtatcctcgacatggcgcgtactgcgctgaacgtggtgggtaatgcgctggcggtgctggtgattgccaagtgggaacacaaatttgaccgtaagaaagcgctggcttatgagcgtgaagtgctgggcaaatttgataaaactgcggatcaataattgaagattgccggggatatccacccggcaatgtgtgaatgcctgatgcgacgcttgccgcgtcttatcaggcctacgccagacagcgcaatagcctgatttagcgtgattttgtaggtcggataaggcgtttatgccgcatccgacatcaacgcctgatgcgacgcttaacgcgtcttatcaggcctacgccagacagcgcaatagcctgatttagcgtgattttgtaggtcggataaggcgtttacgccgcatccgacatcaacgcctgatgcgacgcttgccgcgtcttatcaggcctacgccagacagcgcaatagcctgatttagcgtgattttgtaggtcggataaggcgtttatgccgcatccgacatcaacgcctgatgcgacgcttaacgcgtcttatcaggcctacgccagacagcgcaatagcctgatttagcgtgattttgtaggtcggataaggcgtttacgccgcatccgacatcaatgcctgatgcgacgcttgccgcgtcttatcaggcctatcttaaccgttggttaatttttcaaactcttcacacccggtatcaaacccttccatacagctcaggttcaaccagtgcagcgccttttgcttgttcttctcgataaaaccttcttcaccgtttaagaacatcattcccgcccagtactcggaataaccggttcgggaaattgcagagctgcgtttgaaataccaggttgccttgtcatcgtcggccttaatgcccacgccgttggcgtaaatcaaaccaagcagcatttgggcatcgacggcagagtcgttctccagatcttcgctggcgttttctaacaggctaattgcctttggataatccggtttacccgcttgagtatttaccagaatatgcgccagcgttacttcaccttctttactgcccgcttgcgccgctttctctgcaagaacttttgcttgtggatagtccagactgaccggattggtgattttgatctgcgccagcagcgcgcaggcatcagcatcaccgctgtcggcggctttctgtgcccaatattcggctttgctcaaatcgccggagctaaaccagctgtcggcaagaaaatattgtgcgcgtcggtccccggcctctgctgcctttaaatactggctgccaggctcggagtcgttggcgtgggcaaagaatgtcaaaaacaacatcaatgcgataatttttttcattttgataatacgattgggtagggagtaaccagtataaagagttcgaatggataaaaaaacagcctccgaaaggaggctgtagaaaggacggtattacgccagtgccgcttcgcgcaggcgagttttcaacttgttgtactcgtcaatcacgtactgctcggcggcgcgctgatcggcgatcggctcgacgcgaacggcgcagtatttgtactccggcgttttcgtaatcgggcttaagttttcggtaaccagctcgttacaggcaccaatccaccactggtaggtcatgtaaatcgcccctttgttcggacgatcgctgacctgcgcacgggtgataattttgcctttacggctgtgcacccaaaccaatgcctcatcttcaatacccagacgtttggcgtcttcggtattgatttgtgcgtagccaggttcatcagccagcgccgccagtgccgcacagttaccggtcatgctacggcaagagtagtgaccaacttcacgcaccgtactcagtaccatcgggtactcgtcggtgagtttgtcgattggcgctacccagtcgcaggtgaagaactgcgccagaccgttcggggtatcaaacttctctttaaacagataagaagtcccctgatcggcatcactagtatcgcggcaaggccactgaatgaagcccagttcgcccattttctcgtaagtcgcaccgtagaaatccgggcacagatgacgcaactcatcccagatctcctgggtgttgttgtagtgcatcggataacccatacgggtggcgatttcactgatgatttgccagtccgttttcagatcccatttcggttcaaccgccttgaagaaacgctggaagccacggtcagccgcagtaaacacgccttcatgctcgccccagctcgtactcggtaaaataacatccgccgcgctcgcggttttggtcataaagatgtcctgaacgataaccagttccagatcttcaaaggctttacgtactgcgctcagctccgcgtcagtttgtagcggatcttcgcccataatgtacgcggcacgcacttcgccatgcgctgcgcggtgcggcagctcgctgatgcgatagccggtatgcgctggcaggctttccacgccccaggctttggcgaatttctcgcggttagccggatctttcacgtactggtatcccggatacgtatccggcagcgcgcccatatcgcaggcaccctgaacgttgttctgaccacgaaccgggttaacacccgcatgcggcttaccgaggttaccggtcagcatcgcgaggctggtcagagaacgcacggtttccacgccctggtagaactgggttacacccatgccccacaggatggcggcgcttttcgcctgggcatacatccgtgccgcctgacgaatctcactggcgctgacgccggtgatatcttcaacgctctccggcgtgtagccttcaacgattttacgatactcttcaaagccttctgtacgactagcgacgaacgctttgtcgtacagattttcttcaataatgacatggcccatcgcattcaacagcgcgatgttgctgccgtttttcagtgcaatgtgcatgtcagcaatgcgcgcggtttcaattttgcgcggatcgcagacgataattttcgccccgttacgtttagcgttaattacgtgattcgccacgattgggtgggaatccgccgggttgtacccgaaaacgaacactaaatcggtattatcaatttcgttaatagcattgctcattgcgccattaccgacgctttggtgcagacctgcaacgcttgggccgtgtcagacacgagcgcagcagtcaacgttattggtaccaataacggcgcgcgcaaatttttgcattacatagttggtttcgttacccgtaccacggctggagccggtcgtctggatggcatccggaccgtacttctctttgatggcgctcaggcgctcggcaacgtaattcagtgcctcatcccaggaaacaggttcgagtttgccgccacgctggcgacggatcatgggggttttcaggcgcggggtcaggatctgggtatcgttaatgaagtcccagccataataacccttcagacacagggtaccctggttggttttcccctgcgctgcctccgcccggacgattttgccgttatcgacgaccaggttgattttgcaaccacttgcgcaataggggcaaaccgtgacgacttttttcatcggtctcgctccagttaatcaaatcacgcatacgcgctctcgactacagtatgcatcttttatgccacattttatgtggggtcattccctgatattacgggcactatttattcaaaactctgacgaaaaacaggctgtcgtcagttttgacgtgacgaaacgaaataccgcgtgacagccatcacgcggcagacattttattttttctcgacgacgggacctgcctgatacccgccgcccaggcttttcatcaactgaatgctttggatcacccggcggctgtccagcatcagtaaactcatctcttcggcaagcactggcaaccgggcttcggtggcctgtaagcggctggttaagccgcgctgataggcggcctcggcagcgcgctgggtaaagcgcgtggcttccacgcgttcagcctgcatttctcgctcgtcgttgagcgtttgcagacgcgtgccgttgacggcaacgtcacgcaccgcgttcagtacactctggttgtaacgttcaatcatcatgttgctggcggcgcgcgtgccttcgagattggcattcaaccgtccaccgtcaaacagcggcaatttcagacccgggatgaagttgaactggcgactggtttttttgaataaggtatgcagatggatggagtccagaccgaaaaacgctttgatatcaaagctcggatagaacaacgcccgcgcggaatccacctgatctaaactcgcctgaacataccagcgcatggcttgcagatccgggcgtctggcgagcaactcataagagagtgtcgccggaatgccggtctggacttgcggtaatgccaccggtctgatctccggcatatcgctggctcccgcgccaatcaatgcacgcagagattctcgcgtttcggtgatttgccctttgacggcaacaatttgtttatcgaccgccagaatctgtgcccgcgcgccgtggaaaggcacttgcgcttccagaccgtgcgccactttactctggtgcgctttcaccgcgtaatcaatcacatcgtgagtttgttctaacagatcgagcatctgatagctggcctgcatactgtaataaagctgcgctacgcccgtggccaggcttagctctactgctgcggtttctgccagcgcggcattatgcgcgccaatggcggcggcaaccgcactgcgatgcacaccccacaaatcaagatccagtccggcaaacaaacctactgtggcttccgtatagtacggcccgtccatacccagtgctggcgcatccatactataagggcttaaaaagccgttcgcgctgacacgttggcggttgagcatccctaacgctgcgacctgtaattgactaccggcatctaacaaatcggcctgggactgcgctttttcttcccgcagtttcgcttcggcgagggtgtgactaccacttagcgtccgttggatcagcgcatccagctgcgggtcattgagttgtttccaccactgcgcctgcggccagccggagctggcaagatgaatatcgtcggccagtttgatttgttccggtttgagctgttgatgaggtgcagaatccttacgtaccagggcacagccggaaatcagcgtcgtgctgccgagaatgctgcacaacagcagacgactaagttgacgattgatcattgcgtggctccttgtgcctgttccgtggcgggcgttaatgccggggctgtccagtctggcaagcgggcgaaaagctggcagacgtgttgctcctgttttaataaggtgggcaggatggcctgagaggcgggtgtctcttcaagcgttatttgaggagaacggctgagtgcggttgccagaccggcagcgtatttctccagggcgtcggcaaactgacctgctctgtccggctgtagtgcgttatccagcgcctgcgcgctgttccaggtggcatcccaggcgtgaagaagatcgcggccctgacgaataaccgtttggctacgttcaatcagtaatgcgcgttcttcgctgtccagttgacgctccagcgccacgcgttggcacatctcttcacaggcattaaacgccgcatgcagaccgatacgaatttgcagataagtgcgcagagccgtgacttcctgctggcgtgggatccgcattactttacttaacatacccagcgtgccagccagtttttgcggcagtgtgcgcgcttcactttcaggccagacaaaggtgtaaatcaccgcggacaccacggtaccaatgatgatacccagggcgcgatcgcgaatttccaccaggtcgtacactgggccaaaaacgttttcgagcgtggcgagcgcgaaggtgaccaccatctgtgtgccgatataagaagagcgttcagagctggtggcaatccatgcgcccaacaggaaaatcggtgccagcacaaacagcaattcgacaatattgtccagccagggcatgaccagtagcgtgaataacagcgccagaatcgcgccgcaaaaggccccgccaaaacgcagcaccatcttctggtagctgctaccgacatttgggttagcgacgatcacgcatgtcagcatacaggtgtgaatgccttcccagtccacgccgctgtaaaaggtgtaacagatcaaacaggcgagcagcgtttttaccgcgtagcgcatatagtctggattggtaaaagcatcggcggccatacttggcggtttggctgcgggcgttggcggcgtattcgggtccatctgacccagttgtaacaacgtctggcagatattctccaggttacattcccgtgccgccatcgcttcactttcactgatccgccagtcgctttgccagcactgaccttcagcaacggcatgctgcagcttgttgatttcactagctaatttttgtcggaattcaataattgcctgagaatcagcaaaagaggtgggatcgtagcgattcagcgtgctgtaaatgtaggttaccgttgccacgcagctttgccaccatgcgttttgagttcgccagttggcatcgtccgcgaggcaaaagacattgagtttttgtagcgccagcgcctctctttcaatccgcgtttcgggtagcggtgcgaggctgtctgtcaggtgactaatggcatcatcaagccgatcattaagcgcctgatgcatttggctaatggcacgactgggaaaccacagcacgccgattaacgtcatcagcaaggttggatagaggccaacaacgatacaccacagcgttaagcgcacgaccacttccggatagtcgagcatggcggggaaggtttgcccgtaaatagcgacaatggcgacggcgaaaaagaccagccccaagcgatgggtgcgcatcaaaaacatgcagcccatcaggatcggtccggcgatgatcaatcggatcaacggttcgccgtaactccatttgtagatcaaaaacaggctgccgatctccagcaccgtggcaaccacaaacaagatcgcgacaaatttggtgtaaaacgcgttgctctgaataccgtaaaacagcactgccaggcttaacgccacaaaagggatctcaaaggtcatgctgatcagaatcaccagcaggcagcctacccagagttgcacggtctgcggcacgcgacctggtcgccgctcgcttaactcttcatgaaagaacgccagcagcctgaccaccggtaatggcagggagttgagcgcgctcattattgcggctcaagattagcgactgcgctagcgccgatgcggaacatttccgggtcaggtttatcgaccatgattttgaccggaaaacgctgggcaacgcggacccagttaatagaacgagacactttcggcaggccgcccagcaccaggccgccgtcatccggtagcacgccgtagccaatgctatccactttaccctcgaaggttttgccgctgtcactcatcaggcgaatcgttgcgggtgtaccactgcgaatatttttcagatcggtttcgcggaagttggcgatcacataccagtgacgagtgtcgattagggtaaaaatagggcgcatggcagaagcaaattgcccgacggaggttttgagggaaatgacccggccatcaaacggcgcgcgaacggtcgccatttccagatgcagtttggtcagggcaatatccgcttcgaccgccgcacgctgggcaactaatgcatccacgccgctgacggcgctggcggcactctgcgcctgtaacaatacggcattaagatccgcttctgcggcgcgctgcgccgttcttgcacggtcaacatcttccgcactgacaaaaccttctttcagtaatggctcggtgcggcgtaatgtatctgtggcctgtttcgcggcggcacgggctttttctatcgtggcattaacgctgtcggcaccaaactgttgcgcgtcaacgctacgctgggtgagcataatttgcttatccagcgccgcgagggaggcttcagctttcgccagattggcttcgtacgggcgcgggtcgatgcggaacagcaaatcgccctgtttgactgcctggttgtcggtgaccgccagttctacaatgcggccgctgacttccggtaccacatcaatggtatctgcactcgcgtaagcgtcattagtacttggcgcactgtctacgcgccagataacgaaaacaagggcaaccagcgccaacgcaaccactaacagagcagggaatttactgcgaggagcttttttcggcgtactttccatgagcgcgtctcaaatagattagaaaaatgccagccagaacagcatggcgtagagagcaaaaagggcggtataaataattccgacaaatgccagattgatatttgcccgctgaataactcgcctcgtgatgagcgtcaaaataaggctggcaatggcgcagaaaaaccagctgggataataagcgccgatcaccgggattgccggagataatgagcatcccgaaaccatgaagacgggaattatccaggctgtttttttgagttgcatcgccatgcgagagagaactgttggcatattaaatacatcctgtctgctgcgaacaatatctgtagtgaatatcaatatccattgaaggcgtcagtatggctattttcttgatgaataaaaatagctttattcagccaccgcattcataacttatatattttatttattaattggctgtatatatttttaaaataaatacttttgggggcttcagcgcccccaaaagcgagtgacattaatttggggttacgatattcacccacaaatcgaaattatccagacaggcgataatttcttccagtttcgcgccattgccaataattttggctttcttcgcttttaccagatccgccattttggcttgtccggtcagcacggcgtgcagatcttcacggctgatgtagaaagaggcgtcggcttgcggttgcagcgttttccggtagttaagcacgctatcgttcagcgtcaggttgaggttatcgccgttgctcatattgaagttcaggctgatatttttacccgcagctttcgcgctatcgaggcgaacggccataaagtcgaacagcatttcgacgctcatcccgcgaatggtgtccggggaaccggtggtgccgtggctgaacttatgcaccccttcgcgcagctctttcgcgccggtcaggtagaaaccgcgccatgtggcggactcggcctgatagcccagctgttcaaagttattcgcttgcagattcttcgcgacctggtcacccgggttggcggcaatcacctgtttcagcagttctgcgctccagcggtaatcaccttgcttgttcgcttcttgcgccaggttgatgacacgggcagaaccgcccagcgcctgcacgtaacgtttacccatctccacctgaccatacggatgcaggttagccgggttaccgtcgtaatagccaagatagaagttatacaccgcgcgggcgttgtggctgacagaaccgtaatagccgcggctggcccagttattggcaagtgcaggcggcagcttaatcatgtcgccgatttcattcatggtgtagccctggttcgccaggtgcagggtctggtcgtgaatgtacttgatggtatcgcggtatttaccaatataatcattgatatgcttattgccccagaccggccaggtgtgcggcataaacagcacttccgcgtcgttaccccacatatccagcgtttcgttcagatactcggtccacttgctggtgtcgcgggttttcgcgccgcgcagagtgtagaagttgtgcagggtatgcgtggcgttctcggcggtacacagggctttcagggccggaatatagaagtgcatttcggctggcgcttcgctacctggggtcatcaggaagtcaaactccaggccgtcgataatcatcttctcgccagttctgacgatagttttcgtcggtgcaataatgctcgggtcgcccgttgccagcgtcacgccaaggccattacccacattgccttgcgcgttgtgcggcagtaacagaccgtaagagtagagcgcacggcggctcatgatgttacccgccagcacgttttcgctgatggcttcgtccataaagcctgcaggggcaatcacctgaactttgccggatttaacatcggcttcagagataatgcctttcacgccaccatagtggtcggtgtggctgtgagtgtagataacggcaacaatcggtttttgcggacgatgctggaagtaaaggtcaagtgcggcttttgcggcaggcggcgtcaccagcgggtcgataacaataatgcctttctcgccctcaacgaacgtaatgttagagatatcctggccgcgcacctgatacattttatcggtgactttgaacaggccagaaataccgttgatttggctctgacgccacaggctggggtttacggtttccggcgctgcggcattaatatcaaatttgtaatcgtccgcgcggtagtaaactttaccgttcgcatcacgcagaataccttcatccagcagcggggcgataaatccacgctgggcatcgtcaaaatcctgacgatcgctaaacggtaaacttttggcgtaattctgattaacctgttgggtatattgagtggcggctttcgcttcctctttcgcgttagcggtatttaccatcatgccgctggcggcagttaacgcaataacaatcctgctcaaacggaataaccgagagttattcatataaatctccatttatcatttatgtcgtaaatatgtaatccatgcaaaatacgtcatttaaagctggcgttatcataattgggaaattgcgactttaataagtggaagtgtgagcggaacgcgccattttattaggcatttgtgctgaagagggaaaattacagtaaaactatcattgcagaaaataatatgagtcgttttatgtgtttattatatatattgtacctgtcgttggcacagcgggacattgcgctactgtgccaacgttttactcatggggctttagcacagaactgtggcaaaaaacgttgatgcgccaatattgctgcaccctgagcgccattaaagtcagaagaactggcggcaataaagcgcacgacctgatgcggcagtggacggcgcaggtacttttgggtcatggcaacgagagtctcgcgtgggaaggcgggcatatccatcacgccaccgcccaggatcaccgcatcgggatcgaacagattaatgctggtggcaatggcccgtgccgcgttttcaagcagactctggacgaaaggggcgttttccgcatggacgaaaagatcgcgcaatgggtaatttcggggctgttgttcgtaccagcgtcttagcgccattccagagcaattggtttccaggcacccaggattgccacacgcgcagtgttgggtcatatctcccagggggatatgacccagttcgcctgccacaccgtgtgcacccgtccacggcgcaccgttcatccacactgcgaaccccatccccgtaccgagataggccgccagaaccagttgttgcgtaaggcggttttctactacgtcccaggagagttgcaggttaacgtcgcgggaaaactcaaccggacaattcagcgtattttcgagcttatcggcgagatcatataaatccgccgctgttaacggcaggttaggcgtagaaataatggtgcgtttatctttactgaccagcgccggaaatcccatcaccagaccatgacagcgagcgttaaagcgcctgagttgctcgtcaatcatttcgccgataccgctcaccaggccgggagcaatgacttctgcggtccgctttttttcgcagtgtagcgtttcaccttctgctgtccgcagacaaaagcggatatgcgttgcccccatatccacgcccgctacgacgttatgctgtttttgcatgaggctgtacctcgctttttgcagccagaatctgcgcggtcataattctccatgcttcgtcgatattttccgcatgattaaacaggccggaagtgccgacgataaagacatccgcccctgccgccatcagtttttcgtaagttgcctggttgcaggaaccgtccacctcaatttcgtactccagaccttctcgttcacgccatgccttcagttcggcaagtttatccagcatttcaggaatgaacggttgtccggcaaagccgggatcgacagtcatgaccgtaattttatcggccttatggatatagtatttcatggcctcaactggcgtctccgggttaaggatcagccccactttcatgtcatgacggcggatttcatcaatcaggcggaacgcctggccgttgatggtttccggatgcagagtgatgaaatctgctcccgcacgcgccagttgagcaatgtaatcctgcggccgcgtcaccatcagatgacagtcgagcggtttagttgccagttttttaacctgacttacgaagaacggactgagtgtcagattggggacaaagtgaccgtccatgatatcgatgtggaagtaatcggcatggctgtcgataaattcgatctgttctttaaatttcagcagatccatacacattaagctgggggagattttcatgttcaattccttacttactgataagacggtcaagggcgacagccgcgataattaatccgcccatcaccaccagttggtaataggtttgtacctgcaaaatattcagaccgttgttgatggtgccgatgatcaacccgccaatcaccacagagaaaatgcgccccttgccgccgaagaaactggtgccgccaatgatggcgctggcaatggcataggtttcaaaacccataccggcaagcggttctgcggcaccgagtcgtgcagtactgacgacgcctgccagacctgcacaaacaccggagatgataaacaccaccaggatgtggaatttcacgtcaatcccggaatagaacgcgctatttttgttgccgcccagtgcgtagatgttgcgcccgagccgcatacgcgttgtcagaaaccaaaggatgagcgcgacaattagactgaagataacggggacaggtatcccaattacgctggcggcaaagaagttcacgaagtcaaaactgaagccgtatacgctgttggcatcggagatcaccagcgtgatcccacggaaaatcgcgttggtgccaagggtgatgatgaacgggtgtagccccgtccagttgaccaggcagccgttgatcgcccccagtgcgccgccaaccagtacaccgccaatcatcgctgcgagaaacgggtcaacacctgccaacatcagtttggcggtcaccataccggaaagcgccagaatcgcgccaacgctgaggtcgataccagcgaccaggatagcgaaaaactcgcccatgccgatcaataccgtcacggagctttgaataaaaatctgggtaatattattggtggtcagaaaatattctggactcaggctaccaaagatggcgacgatgatcgccaggataaaaaaggtgccgtatttatcccagaacagcgcaaagttgaacggtttcttctcgctcgcttcgctttttactcttgtggtaaagcccatgccataatctcctcttcgctcatgtcatcgcgattcgtcaggatttgcgtcagtcgtccttcgcagaacacggcgatgcggtcgcagacggtgataatttcaggtagttcagaactcaccatcaggatgacttttccgtcgtccgccagttggcgcatcactttgtaaatttcggctttcgcgccaacgtcgatgccgcgggtaggttcatcgaaaataatcacttccgggcaacagcacagccatttggagatcaggactttctgctgatttcccccggagagttcggtgatattctggtttacgctatgacatttcagcgccagcagttcgcgttgattttcagcggtacgttgctcgtcaacttcatgaaacaagcccatcgcgcctttatagccgccgtctttcagactgcggctgatcgccatgttctgagcgatggaaaagttggggaaaaaaccgttatcccggcggctttcagtgatgtaagccatcccttttttcacggcatccaggggactacgtggagagatatctttgccattaagacggatttctccgccagcgcgtttatccacgccaaacagacaattcatcagttcagtacgtccggaaccgaccagtccggcaaagcctaatatttctccccggcagacgctaaaactgatatcccggaccttttttctgtcacgactggtgacgttccgcacctcaaaaaccgtttcgtgcgcaaggttgctgacattctccttcatcgcgttaaaacggttttgcagttcgcggcctaccatcagacggacgatatcgtcattactcacatcgcttactatgccgctgcaaacgctgctgccgtctttcatcaccgtatagcggtcgcaaatacggcgaatttccgccaacttatggctgatatagacgatggccgtaccctctttacgcaactgattcatgatcagaaacagatagtccacctctttattggtgagactggaggtgggttcatccatgatgatgactttggcatcgagcatcagcgttttggcaatttctagcatctgcttgtggctgatagataaattcgccactttctcatctagatcaactttcaagcccacgcgtaataacatcatggcggcgcggacacgcatttctcgccagtcgataatattgacgccacagatttttttcgtcagatgacgaccaatatataaattttccagtacggttaattcatcaataacgctgagttcctgataaataatcccgataccgagttgtgccgctaatttatgatccagcttgttatagctaatgttattaatggtaatggtgcctttggtcggctcatgtattccggataaaactttcattagcgtggatttacccgcgccattttctcctagtaatgcatgtatttcaccaggataaaccgttaaattaacgctctttaatgcgtgaaccggaccaaaggacttgccgatccccgccatgcttatatatggcgtggccataaataacctctctgcacgaaatatcgtattattgcctgatggctacatttatcaggtctacgttcaggttattttgttggccggataagacacttcattagcatcatcatccggcatcattcagttttattgagtgaccaggatactatcgaccagtttaaattccggtgctttatccagcgggataaccttgccggatttctcagcgtcaaccatcagcttcagacccgttgcgccgatatccgccgggttctgggcaaccgtcgcggtcatttgtccggcttccaccattttgcgggcttccggaatgccatctgtaccgacgaccagcacttttcccgtttttccggcgtttgcgactgcctgagcaacacccattgccatcgtgtcattcgcgcaatagatcgctttaatattcggattacgttgcaacacgttagtggcgacatccagtgctttaatgcggtcccagtcggcaggctggctggcgacaagcttgatctggcttgcttttttgaaggcttcggtggcaccattacgacgcgcttcaccggaggcgttaccggctttaccctcaatgattgcgacttcaccaccttcagcgcccaatttgtcaataatgaagctcgcgcctttcgccccgacagcaacgttatcggtggtgacaaaagcttccacattgccgccagcttttttcagattatccatgtcgattttttcatcgagattaaccagataaatgccttttttccatgcgcgggcgacaggcatgaccagattcacactggataatggagcgaaggcgatacctttgtaatttttattactgagatcttcaaataactgcaattgagattgaaaatcgccttcactaggagaggcaaaaatatcaacgctgacgcccagtgtttttgcttcatcttcaatgccttttttcatatctacccaaaatgggttggagagggttttcaatacgacagcatattcggcggcagcaaaagcgctggtactcaacattaagcccacgagtgtgccgctgaaatatttcagatatttattcataataatgttctcacggtaaggggacaggtaactccgcgatggcggaattacctttttcttatttcagcgcgcctggactgaagaaatcaacaattgcgccggttttttgcatattaatattagcttgttcaatgttgagctgggcgacagagacaaaaaaagcgtccagcaaagttagttgtaatattcttgcgctggcattacgacctaataacggcgtttccggggctggactgcaaataatataatcggccagtttcgctatcggactatggtagctatgggttatacaaataatctttgccccgttcttttttgccagttctacggccgcttttacatcactggttcgcccggaatgggtcactaccagcacaacatctccttcctgtaacaagctagcggacatcatcatgatgtgagcatcaggataggcctgacagcgtacgccaatgcgcaagaacttgtgctgtacatcagcacagatagcattacttcctccggcaccgtacaaatcccgctgtctggcctgatagaaaaagcgggcggcacggtggatctcatcaacgttgacgatgctctgaccttccataatggtgcgtaaagtgatgttaaataccttattcaccacatcctgcggcgcttcatcaaaagccaactcggaaggcaatacctgttcactctgagaaaaataatcttccagcgcactgcgtaagttacgaaagccgctaaaccccagcagcttacttaccttaactatcatcgcttcagataccgccagagcttctgcgacatctttaattgcgggtgcacaactcaggttaccgggtttgagtaaccactccacgatgcggctttcattttctgtcattccttcctgcttcattcgcaggtaaggcgctaaccctataccgttcggaagcgcactatcaaactcactctggctcatcacgttctcttgtccttgaattgaagacgccactatatcaccacagcaagaacagaaaagatgctggcgacttcacaaaaaaataaaatttataaagtttattttattgtgaacaatggcgagtggcttaaaattttatttcatttaattagtttaaaaacatgatgttatttgtttttctggttttttagatgatagatgttgctggatggtgagtgtctttaacgctattgcgctgtcagatgtaactctgtaaaacagatcaggaaggcgtaattcatcgattttgggtgtttttaattcattaacatcacaaatgttttttgattgtgaagttttgcacggacggggaagatgaatgaaaaagattgcatttggctgtgatcatgtcggtttcattttaaaacatgaaatagtggcacatttagttgagcgtggcgttgaagtgattgataaaggaacctggagcagtgagcgtactgattatccacattacgccagtcaagtcgcactggctgttgctggcggagaggttgatggcgggattttgatttgtggtactggcgtcggtattagcatagcggcgaacaagtttgccggaattcgcgcggtcgtctgtagcgaaccttattccgcgcaacttagccggcagcataacgacaccaacgtgctggcttttggtagtcgagtggttggcctcgaactggcaaaaatgattgtggatgcgtggctgggcgcacagtacgaaggcggtcgtcatcaacaacgcgtggaggcgattacggcaatagagcagcggagaaattgagattcatccactacttgcatggatgagtaatgattaatgtggatagagtttctttttgaggttggctaatgaaacgctttccgctatttcttttattcaccctgctcacgctgtccaccgttccggcccaggccgatattatcgacgacaccattggcaatattcagcaggcgattaatgacgcttataaccctgaccgtgggcgagactatgaagatagccgcgacgacggctggcagcgtgaagtgagcgacgatcggcgcagacaatatgacgaccgccgccgccagtttgaagatcgccgcaggcagctggacgatcgccagcgccagcttgatcaggagcgtcggcaactggaggatgaagagcggagaatggaagatgagtatgggcgatgaggttgggtatggagcaggcatcgcccctcaccccaatggggagagggagaaaacgagcgcaatattcaatatcgagcacaatcggtcccctcgcccctctggggagagggttagggtgagggggccagcgcgcacattccctctcatcacgccaccccaatctccatcccatcaaaccccacctcaaacccactcggtagtgcgttttccatcagccacgcatcaaactggtggctgatatgggtcagaatcacccgtgggctgcggataacctgattcagcgcaagcacggtatttaaatcacagtgattacgcggtgcatccgcgcgcggcgggtgactgcaatccatcaccattacctgcggctgattattgcgtaaaaatttcagcgttttttccggcaagcctgcggtgtcagacagccacgccacccggctgtgtgccgtttccagcagataaccgaaggtcagtttactgtggttgagcggcaggggcgtgacctgtaacccctgcaaatcaaacaccacaaacggttccaccgtgtggctgaaatcaagcaggcccggatgtttaaacagatcgtcgcagccctgttcatccggcgggccgtaaaccgggatcggatcgccaacgccccagcgcagcggaaacagcccctggacgtgatccatatgataatgcgtcagcaaaaactgctggaagcttccggggctccagcgatcggcgagatcgtgcagcccggcgtcgatcagggtgattgcgtcgttaaacttcactacgccgctgcacggttggcggcgatactgcgggctgcgccgcgctctggcgcaggccgcacactcgcagccccatgccggaacgccctgtgcgccgccggtgccggtgagcgtgagggtcaggctcatgttacagcgccttggtgaagcggaagtggctctgctcgtagccttcgcgcagatagaaacggtgcgcgtcgtggcgcttcacgttggtgctaagttcggtcatttcggccccggcctggcgggcttcttcttctgcccacgccagtaacttactgccgacgttcagaccgcgcgcctgcggcattaccaccaactcctgaatttcgccgatccagttgacatgatgcagatgaaactgcaaatgcaggccgatcatgccgacaacttcgccatcaagcagcgccagatggtagcgcatgtttgggtcgcgcagattggcgttaaaacccacgcgaaacgcgtggtggtcaaactccgcctgttttagctcacaaatcagcgcgtaaaccgcgtcggtgtcgtactgcgtggccgggcgaagctcacaagcaggcatggtgtttctccttctgatggatcagcgtcagcagcgtgtcgacgctctggcgcaggctgccgtcattgttgagcgtatggcaatcctgtggagtatagcgggcggcgcgcgccaggcgggcgttaatttcactggcgttttcacggccacggttttccaggcgctggcggaggatctccgggctaacctgtaaacagacgggcagcagcgcgctttgatagcgcgcccgcgcctgcggcagatgggcgcgactgccgttgaccagcacgtcgaatccggcgtgcagccagagatcaatctcgacgccgacgccataatacagaccgttagcgtgccagcttaaggccaacagattttgccccgcgcgggtaaaaaactcctgctcgctcagggcgatatggttttcacttccggcgctggcatcgcgcgtgatgtagcgatgcgccaccagtaactgagtttgttcccgcaggcggagttccgccagcaggctgtctttcccggagccggacggccccattaaccaaatcagttttcccatcatcagaacacccttttaccctgacgccagacgtggtcgatatgaatatgattgtccttgcgatgcgccagcaccaggtcggcgcgtttgccctcgccaatcaccccgcgatcctggagattaagcgcctgcgctggatttttagtcaccagcttcaccgcctgcggcagcgtaaagcggttgctctggtcatcggcgacgcgaaatgccgcatcgagcaggctggcggggtagtagtcggaagagaggatatccagcaggccaagctgcgccagttcactggccgccacgttgccggagtggctgccgccgcgcacaatattcggcgcgcccatcagcacgttcatgccatgcttgcggctggcttccgccgcttcgaacgtggtgggaaattcggcgatcacgctgccaagctggtgagattcagcaacgtgggcgtgggtggcgtcatcgtggctggcaagcgcaatttttcgcgcgcggcacagggcggcgatggattcgcgattcggctggctccagcgtgcggcgagcgccagttgctcttcttcgtactgctgcatctgcgcatcagtgagggagtatttgccctgataatattcgcgatacttctcgcggttggcgaactggcgctggcccgggctgtggtccatcaggctcaccagcgtcaccggctcgcgctgcaccagtttttcaaacagcggcagcgtggtgtgatgcggcagttcgcagcgcagatgcagacggtgctcggcgcggttgacgccgcgtttctgcgtctcttcgatggcgttgatcatcttctccagattctccagccgatcgccgccgtcgcgcacgtcgccaattgccacggcatccagtacggtggtgatgccgctcgccaccatcagcgcgtcgtggctgctcatcgcgctgtgggcaggccagtcaactttcgggcgcggggtgaagaatttatccagattatcggtatgcagctcaatcagccccggcagcagccagccgccttcgccgtccatcgcctccggcaggcggctctggctttcggcaaaggcgcggatttcgccgttctgcacctccaggctaccgcttaccacctcgttttccagcaccagcttaacgttattgataatcatgaagaggctcccattgggtgttagctcaactagaggctcccattgggtgcaggcggtcggcgacgtcattacgtacagcttcgtcatggaagatgcctacgatggctgcgccacgggttttggcttcgcgaatcagttccaccaccgcggcgctgtttttggcgtccaggctggcggtaggttcgtcaagcagcagaatggggtagtcgacgataaagccgcgggcgatgttgacgcgctgctgttcgccaccggaaaatgtgcttggtgccaggtgccacaggcgttccggcacgttcaggcgggtgagaagacgcgcggctttagcggcgcaggcttcacgcggaacgccggtatcgagcagcggctgcatcaccacttccagtgcactgatacgcgggatgacgcgcagaaactggctcacccagccgacggtggttttgcggatttccaccactttgcgcgctggcgcggtgaccaggtctacccactcgtcaccgtgtttgatctggatttgaccttcgtcgggcagatagttggcgtacaggctgcgtagcagagtacttttgccgctgccggaatggccgtggagcaccacgcattcgcccgcgttgacggtgaggctggcgcgattgaggacgggcaggcgcacgccgttttgctggtgcaggatgaaggttttactgacgttttgtacgttaatcatttttcgcctcgtggttcgggtgtcggatgcgacgctgacgcgtcttatccgacctacggggagcgcatttgtaggccggataaggcgtttacgccgcatccggcaccggctcaattctgcaaaacgctactcaccagcagctgtgtatacggatgatgcgggtcgtcgagcacgcggtcggttaacccactctccaccacttgcccctgcttcatcaccagcaaacggtccgccagcaggcgggcgacgcctaaatcatgggtgacaatcaccaccgcgaggttcagctccaccaccaggccgcgcagcaggtcgagcaggcgggcctgcacgctcacatccagcccgccggtcggttcatccataaacaccagcttcggatgcgtcaccaggttgcgggcaatctgcaaacgctgctgcataccgccggaaaaggtggtcggcaggtcgtcgatccggttggcgggaatctccacctcttccagccacttctgcgcggtggcacgaatatcgccgtaatgacgtgccccggtcgccatcagccgctcgccgatattgccgcctgcgctcacctggcggcgcaggccgtcgagtggatgctgatgcaccacgccccattcggtacgcagcaggcgacggcggtcggcctcgctcattgcatacaggctacggttctcgtagtgaatttccccctgctgcggcgtcaggcgcgcggagatgctcttcagcagcgtggtcttcccggagccggattccccgacaatgcccagcacttcccccggccataaatcaaaagagacatcgctaaagcctttgcccggcgcgtaaaggtgggtcaggttattgacgctaagtaacggttgattcattggttttttgcctcgctctgttggcggcaataatcggtatcggagcagacaaacatgcggtttccggcgtcatccagcaccacttcatcaagatagctgtgggtgcttccgcagatggcgcatggctcatcccactgctgaacggtgaacgggtgatcgtcgaaatcgagactttccacgcgggtaaacggcggcaccgcatagatgcgcttctcgcgccccgcgccgaacagttgcagggcgggcatcatgtccatttttgggttatcgaatttcgggatcgggctcgggtccatcacgtagcgcccatttaccttcaccggataggcgtaggtggtggcgatatgaccgaagcgggcgatatcttcatacagtttcacctgcatcacgccgtactcttccagcgcgtgcatggtgcgggtttccgtttcgcgcggctcgataaagcgcagcggctcggggattggcacctggaagataattatctgatcttcggtcagcggcgtttcggggatgcggtgacgcgtctggataaccgtcgcatcgtccgtacgttccgtggtgtttaccccggtcacgcgcttgaagaagttgcgaatgctcacggcgttggtggtgtcatccgcgccctggtcaatcaccttcagcacgtcgctttcgccaatcacgctggcggtaagctgaatgccgccggttccccagccgtacggcatcggcatctcgcgcccgccaaacggcacctgataaccggggatcgccaccgcttttaagatggcgcggcggatcatgcgtttggtctgctcgtcgaggtaggcaaagttgtagccgctcagattagccatggttctgctcctgttgcagacgtttgagtagctccagttcggcctggaaatcgacgtagtgggggagtttgaggtgactgacaaagcctgcggcttcgacgttgtcggcatgtgccagcacgaactcttcatcctgcgccgggcctgtcgcgtgctcgccgtactccggggcttgcagagcgcggtcgaccagcgccatcgccatcgctttgcgctcgctcatgccgaacaccagcccgtagccgcgcgtgaagtgcggcggctcacccggcgggtcgataaaaccgttaaccatttcacactcagtcatcagcagttcgccgacgttcaccgcaaatcccagctcttccggcacaatgctcacgtcgatatagccgctgcggatctcgcctgcgaacgggtgattgcgcccgtaaccgcgttgggtggagtaggccagcgccagcaaatagccttcgtcgccgcgcatcaactgctgcaaacgggaggagcgactgcaggggtaaaccggcggcgtgcgggtgatgtcatccggctgtgcgccgctatcctcttcaaacttcgccagcccctgacgcgccagcaggctgaaaacgtgcgggctcggctgctgttcgctgtcggcggtggtcagcgtcggcgcttcgccgtttgccagcagggtaaaatcgagcaggcgatgggtgtagtcgtaggttgggccaagcagctggccgccgggaatgtctttataaacggcggagatacggcgttcgagacgcatcccggtggtgtcgagcggctcgcttaccgccagcttcgccaacgtggtgcggtaggcgcgcagcaggaaaatcgcttcaacgttatcgccgctggcctgtttcagcgccagcgccgccagttcgcggtcggcaatgccgccttcggtcatcacgcgatctaccgcgaggttaagctgctgttcaatctgggcgacgctcagttcgggcaaatcggtatcgcctcggcgtcggctctcttgcagggcgtgggcggcgtcgatcgccttctcgccccctttcacggcaacgtacatcagcacacctccacatgagtggttcgcggaatagccagcaggcgctcgccacaggtcaggatcaggtcgatgccgagcgggaacggatgcgggcgctcggtgagttcgtgcagaatgcactccggcagctgcggagcgatcattcgttcttcggcaatacccgcaccagtaaggcgcaacatgcgtccgccgctcaggctggcgacctgtaaaatcagcgtcgcacccgcttccggcgcaacggcggtgccggtggaaagggcgttgagctgttcgctggaaatcgcctcatccgtcaccgcgaaggtcgcctgttccggctggctgaccagcggcgcgttggtatgaaaacgcaggctctggttgacgatatcgttatttaatggggtagaaagccacaccggcgtgtcgttatcggccagcgtcagcagcacgctggtggtggcgatattcagcggttgccagccgcgtttgagctgatgcagggcgacaatcacgcccggctcgctcatggcctttaacaggcgacgaaaactgtgctgggcatcctgcacgggaagcataaaagcggtttccagggtcatgcgttgtctccgcgaaccatcgtaaagaagtcgacccggctggcgttcacttcggcctggcgtgcggcaatgcgtgccatacggtcagcgtccagcggggcaataagggtttcacttaagttttgaaagtggcgagattgctgcatcagcgcgtcaatcagcgcgcagcgttcggcgtgctgtttatcacgcccctgcacccagctgtagccgagcgtgccgtcagtcaggcgcacggcggcgcgggtcagcgtggcgtcgccggcaaaaaaacgttcgccggtgccgcccatccgcgcctgaatctgtaccaggccagtttcagcggcgcggatcacctcatagtcggcggtgatgtttagcgcgttcaggcgtgctgccagttcagccggttggctgtgcgccagcacggacatccagtgctggcgggtcgcggtatctgcgtgcattcagtgctccatagtgaattcaatcatgtcggcgcgcgtcaggctgacggagtactccgccgggctgctttcaccgtcacggtggttaagggtgcgcacgcacagcagcgggctcatattcgggatttcaagacgctggcactctttggcctgggcgcggcgggcgctgatccgcgtctggctgcggcgcagcgcaattccggtttgctcgcgcagaaaatcgtgcaggctgccgctgtcgaagcgttgcagcgtcggccagagggtgaggtccgcgaagtagtggtcgattaaacagagcgcgacgccgttgacacgacgcagggtgcgcaggtggatgacgttctccccctcggtaatccccagtgcgtcagcgacgtggccggacgcggggcgcaatacgctaagcagtttttcgctggtgggatggctgccctgatccagcagattctggctaaaacgcgcctgggcgttgagcgggtaatcgaacgggcgcatcagcaccagcacgccgacgccctgacggcgctgtacccagcctttttccaccagttggtcgatggcgcggcgcagggtgtggcgattcacctcaaagcgcgctgccagttgctgctcggcgggaagatagtcgccgcagcggtagtgttgacgaagctcctgctcaagttttgcggctatctcttgatagcgtgttgggtagctggtcggatgtgtagacaagtgcatagatatcaatgcctcgcttatcagataaagtgcttacgcaaccgttgagagaggaaatccagcaggctgaccgtgacgatgataagcaccatcagggcgcaggtttgttggaactggaaaccgcgaatcgcttcccacagggtgacgccgatcccgcctgcgccgaccatgccgacgacggtcgccgagcggacgttggattcgaagcgatagagggagtaggagatcagcagtggcatcacctgtggcagcacgccgtagaggatctcttcgagcttgttggcaccggtggcgcgaatgccttccaccgggccgggctcaatcgcttccaccgcttcggaaagcagcttggagagcacgccggtggtgtggataaacagcgccagcacgccagcacgccagcgaacgggccgaggccgacggcgaccacgaacagcatggcgaagaccatttcgttaatggcgcggcaggcgtccatcaggcggcgaacgggctggtaaacccaccacggcaccaggttttcggcgctcatcaggccaaaggggatggagagaaccaccgccagcgcggtgccccagacggcgatttgcagcgtgacggccatttcggtgaggtaatcctgccactggctgaaatcgggcgggaagaagtcggcggcgaacgtcgccatgttgccgccgtctttgatcagcgtaagcggggccatttccgcgccctgccacgagacgaccaacacggcgagtacaacggcccagctcagaagcgagaaccagctgcgcttgggtggggcgatggtgatggtttgcatgtttggctccggtctgtaggccggataaggtgcttgcaccgcatccggcatcaacgcctgcacattgtcggatgcgacgccggggcgtcttatccgacctacgatttactgcaccgctttactcacgctactcatcgcgcttagcgcgttgttcaggcggtccaggtcatccagctgcgcctgaatctcggtggtttttgccagcttgtcctgctcattcagtcctttattgcttttcacgccctgcatctctttaaacagcgcgagctggcgaatcggcaccagttgcaggtcgctggaagcgcggaatggcgcccagcccaggcgttccagcaccgctttttcttccggcgttttgccgtagttcataaagaagtcgtagatcttgtctttggtggtttcggaaagattcttgcgccagacgatcggatcgcctgggatcagcgggctcttccagatcaccttcagttctttcagcttctctggcgcggaggttttcagcttgtcgaggttttcggtgttgttggtggcaacatccacctgcttgttggcgacggccagcgcgttggtttcatgcccggcgttgacggtgcgcttgaagtcgctggcggagatattgtttttggcgaagacgtagtagccggggacgaggaagccagaggtggagttaggatcgccattgccaaaggtgagatctttccgcttcgccagcagatcgttcaggttgttgatcggactgtctttgttgacgatcaacacgctccagtaacccgggcttccatccgccgcgaccgtctgggcgaagacctggccattggcgcgatccaccgcttccatcgcgctcagattgccgtaccaggcgatatccactttattgaagcgcatcccctggataatgcccgcgtagtccggggcaaagaaggcgttgaccttcacgcccagcttcttctccatatcctgcaagaacggcgtccattgcggtttcaggttttgctgactttccgtactaataatgccgaaattcaacgccttttcctgctcttcggcgtgcgccgggcttaacagggtgctgaggctgaacatgctggtgaaggccaggctggcaattatcttagcgttcattcgttttcctcaatgatggggatgtcaggcagctttcgcgttctcttcgacgcggttaatgctgcggtagagatggtcaaaacgttcgttatcaaactgttggctgctgccgtcgtagaagacgtgcccctggcgcagggcgacgatgcgttcgcagtagcgcagggcgtaatccacctgatgcagcgtgacgaccacggtgatgccgtcgttctggttgatgtcgcgcagggtgtccatcacgatgcgcgcactttctgggtccaggctggcgatgggttcatcggccagaatcactttcgcctgctgcatcagcgcacgggcaatcgccacacgttgctgctggccgccggagagggtggaaacgcgctgatgggcaaaatgcaccatgccaacgcgggtcagcgcctgtaacgcgcgctgtttctgctcgccggtgaaccagctaaaacaggtgcgccagaacggcgtgctgccgagcgcgccaatcagcacgttctccagtacgctcaggcggttcaccaggttgaattgttggaatatgtagccggtatgggcgcggcttttgcggatatcgcgggccaggcggccttcgcgctggactgtgcggcccagcagctcgatatggctaccgacagatttatcgccggtaatcaaaccgcttaagtgacgtaaaagggtggattttccggaaccgctcggcccaagcagagccaccatttcaccgtgatgaatgttcagatcaaccgcatgcagcgcctgatgctgattgaaggttttggcgagcttctcgacacggataatcgtttgcatgatgcagcctccctaaaaaagtggctccatcgtggcggattattgtgacgatttggttaattaaaagtgactaacagatgaagagttaacgggaattcgatgacagtgcgggagggcgggcctcccggcgggttattgcgttggttgttgtttgacgacattaatcatccacggtacgccaaatttatcggtgactttgccaaagccatgcgcccagaaagtttcctgccaggccatttcgatttttccgttagcggcaagattgtcaaaccagcgttttccttcttcgacctgttggctatcgagcaccagcgtaaagccggagtagctggcttttccactcggcatggcatcgctcatcatgatgtcgcttccggcaatgcgcacattggcgtgggcgatggcggtatcgggaaattgcattccggaagggcagttctcggcgctgtcctgcgcactttttggcatttcgccgaagctgattttatagagcagttccgcgcccaacgtacgttgataataggcaatcgcgtcggaacagttaccggcaaaagagaggtagggacttaacggcatgatggtgacctcagttaagagaagccagttaagtgtagttcgaaatttatacagatgagaggcggcctgataagacgcgcgagcgtcgcatcaggcagtcggcactgttgccggatgcggcgtaaacgccttatccggcctacggagggtgcgggaatttgtaggcctgataagacgcgcaagcgtcgcatcaggcagtcggcaccattgccggatgcggcgtaaacgccttatccggcctacggagggtgcgggaatttgtaggcctgataagacgcgcaagcgtcgcatcaggcagtcggcaccgttgccggatgcggcgtaaacgccttatccggcctacggatggtgcgggaatttgtaggcctgataagacgcgcaagcgtcgcatcaggcagttggcactgttgccggatgcggcgtaaacgccttatccggcctacggagggtgcgggaatttgtaggcctgataagacgcgcaagcgtcgcatcaggcagtcggcaccgttgccggatgcggcgtaaacgccttatccggcctacggagggtgcgggaatttgtaggcctgataagacgcgcaagcgtcgcatcaggcatctggcaccgttgccggatgcggcgcgagcgccttatccggcttaccgatcacaatacaatcagttctttttcacaaactcagatttcagtttcatcggaccaaaaccgtcgattttgcaatcgatgttatggtcgccttcaaccaggcggatgtttttcactttggtgccaattttcagcatgctagagctacctttcaccttcagatctttaatgatggtaacgctgtcgccgtcagccagcagattgccgttagcatctttaacgatcagctcgtcgctttcctgtgcaggttctgcgtcgttccattcgtaggcacattccgggcagatgtacatgccgttatcttcgtaggtgtattcggagttgcattttgggcagtgtggtaaactcatgtggatttcctcaaaagtcagcagggcaaaagcgccaaaaaacggcagattgccgaaaaaggccgcaattatacacaaaatccctgagtttgtcgggggtactgctgattttagacgacgatcgttttcatttgaaaggaaacgcaaaaagaaaataatctttttgcctctatttattatttaagataatgttaatgctctacttgttctttttttaattcacatgatatttttatctttctgacgttttaaacgtatcagaagacgttatttattctgataaaaaacaacacactaaatataaaattatttcttgcagtaattataaaagccgaaaacagaactcaaaaacaatctggctaaataaaataacaaaatttgctttaaggaagaattttctatgtacacacagaccctgtatgagttaagtcaggaggctgaacgcctgttacagctttctcgccaacagttgcagttactggaaaaaatgcctctctctgtacccggagacgacgcgccacaactggctttaccctggagtcagcctaatatcgccgaacgtcacgcgatgctgaataatgagttgcgtaaaatttcccgactggaaatggtgcttgcaattgtcggtaccatgaaagcagggaaaagtaccaccattaatgccattgttggtacggaggttctgcctaatcgtaatcgcccaatgactgcgctgccgacgcttattcgccatacgcccgggcaaaaggaaccggtactgcattttagtcatgtcgcgccaatcgattgtttaattcaacaattacaacagcgcctgcgtgattgcgatattaagcatctgaccgatgtgctggaaatagataaagatatgcgtgcgcttatgcagcggatcgaaaatggcgtcgctttcgaaaaatattatctgggtgcccagcctatttttcattgtctgaaaagtttgaatgatttagtgcgactggcgaaggcgctggacgtcgattttcctttttctgcttacgccgccattgagcatattcccgtgattgaagtggagtttgtccatctagcggggctggagagttatcccggtcagttgacgttactggatacccccgggccaaatgaagccgggcaaccgcatctgcaaaaaatgcttaaccagcagctggcacgcgccagcgcggtactggcggtgctggattatacgcaactgaaaagcatctccgatgaagaggtccgtgaggcgattttggcggtggggcaaagcgtgccgctgtacgtgctggtcaataagttcgatcaacaggatcgtaacagtgacgacgccgaccaggtgcgggcactgatttccgggacgctgatgaaagactgtattacgccacagcagatatttccggtgagcagcatgtggggctacctggcgaatcgggcgcgctatgagttagccaacaacggtaagttaccaccgccagagcaacaacgctgggtggaagattttgcccatgccgcgcttggcaggcgctggcgtcatgccgatctggcggacctcgaacatattcgtcatgctgccgatcagttgtgggaagatagcctgttcgcccagccaattcaggcgttgcttcatgccgcttacgctaacgccagcttgtatgctctgcgatctgccgcgcataaactgttgaattacgcgcagcaggcgcgggaatacctggattttcgtgcgcacgggttaaacgtcgcttgtgaacaattgcggcaaaatatccaccagatcgaagaaagtttgcagctattgcaactcaatcaggcgcaggtgagcggcgagattaaacatgaaatcgagctggccctgacctccgccaaccactttctgcgtcaacagcaagatgcgctgaaggtgcagttagccgccttgtttcaggatgatagcgagccgttaagcgagattcgtacccgctgtgagacactgttacagacggcgcagaacaccatcagtcgcgactttacgctgcgttttgccgagcttgaatccaccctttgccgggtgttaaccgatgttattcgccccattgagcaacaagtcaaaatggaattgagcgagagtgggtttcgtcctgggtttcattttcctgtttttcacggcgtagttccccacttcaacactcgccagctgttcagtgaagtcattagccgccaggaagcaacggacgagcagagcacgcgtttaggcgttgtgcgtgagacttttagccgctggttgaatcagcccgactggggacggggaaatgagaaaagtccgacagaaacggttgattacagtgtgttgcaacgagcattaagcgcagaagtcgatctctattgccaacaaatggctaaagttctggcagagcaggtcgatgaatctgttacggcaggcatgaatacttttttcgctgagttcgctagttgtttgacggaattacagacgcgtttacgcgaaagtctggctctgcgtcaacaaaatgaaagcgtggtcaggctgatgcagcagcaattgcagcagactgtgatgactcacggctggatttacaccgacgcccagctgttacgcgatgatattcaaacacttttcacggcagaacgatattgaccaagacgttacttgacggccccggtcgcgtgctggagagcgtttatccccgctttttagtggatctggcgcagggtgatgatgcccgccttccacaagcccatcagcagcagtttcgtgaacgactgatgcaggaacttcttagccgtgtgcagcttcagacatggacgaacggcggcatgttaaatgcgccgcttagcctgcgtctgacattggtggaaaaactggcgagcatgctggatcccggtcatctggcactgacgcagatcgcgcagcatctggcgctgctgcaaaaaatggatcaccgccagcactctgctttcccggagctcccccagcaaattgccgccttgtatgagtggtttagtgcccgttgtcgctggaaggaaaaggcgttaacgcaacgaggcctactggtgcaggcaggtgatcagagcgagcaaatttttacccgctggcgtgctggggcgtataacgcctggagcttgcctgggcgctgttttatcgttctggaggagttgcgctggggggcatttggcgatgcctgccgtctgggaagcccgcaagcggtggcgttgttgctgggtgatttgctcgagaaagcgacacaacatctggcagagagtatcaatgcggcaccgaccacgcgtcactattaccatcagtggtttgcctctagcaccgttccgacgggcggggagcatgctgattttttaagttggctgggaaagtggaccacggcagataaacaacccgtttgctggagtgtgacccaacgctggcaaactgtcgcgctggggatgccacgactctgtagtgcgcagcgtctggcgggggcaatgctcgaggaaatcttctctgtaaatttggcgtaaataatcagttacatcaatgagtcctaaacgaaatccatgtgtgaagttgatcacaaatttaaacactggtagggtaaaaaggtcattaactgcccaattcaggcgtcaactggtttgattgtacattccttaaccggagggtgtaagcaaacccgctacgcttgttacagagattgcatcctgcaattcccgctccccttttgcggccgtcgcgctgatttttctggcgtttgcggaaatgggccaactctgcgaggaaagctatgctgaaaaggaaaaaagtaaaaccgattacccttcgtgatgtcaccattattgatgacggtaaactgcgtaaagccattaccgcagcaagtctgggtaatgcaatggaatggttcgattttggtgtttatggttttgttgcttacgcattaggtaaagtttttttcccgggggctgaccccagcgtgcagatggttgctgcacttgccactttctccgttccctttctgattcgaccgcttggcggactcttctttggtatgttgggcgataaatatggtcgccagaagatcctcgctatcactattgtgattatgagcatcagtacgttctgtattggcttaataccgtcctacgacacgattggtatttgggcaccgattctgctgttgatctgtaagatggcacaaggtttcagcgtcggcggtgaatataccggggcgagcatatttgttgcggaatactcccctgaccgtaaacgtggctttatgggcagctggctggacttcggttctattgccgggtttgtgctgggtgcgggcgtggtggtgttaattagcaccattgtcggcgaagcgaacttcctcgattggggctggcgtattccgttctttatcgctctgccgttagggattatcgggctttacctgcgccatgcgctggaagagactccggcgttccagcagcatgtcgataaactggaacagggcgaccgtgaaggtttgcaggatggcccgaaagtcagctttaaagagattgccactaaatactggcgcagcctgttgacatgtattggtctggtaattgccaccaacgtgacttactacatgttgctgacctatatgccgagttatttgagccataacctgcattactccgaagaccacggggtgctgattattatcgccattatgatcggtatgctgtttgtccagccggtgatgggcttgctgagtgaccgttttggccgtcgtccgtttgtgctacttggtagtgttgccctgtttgtgttggcgatcccggcgtttattctgattaacagtaacgtcatcggcctgatttttgccgggttactgatgctggcggtgatccttaactgctttacgggcgttatggcttctaccttgccagcgatgttcccgacgcatatccgttacagcgcgctggcggcggcatttaatattagcgtgctggttgccggtctgacgccaacgctggcggcctggctggtcgaaagcagccagaatctgatgatgcctgcctattacctgatggtagtggcggtggttggtttaatcaccggcgtaaccatgaaagagacggcaaatcgtccgttgaaaggtgcgacaccggcggcgagtgatatacaggaagcgaaggaaattctcgtcgagcattacgataatatcgagcagaaaatcgatgatattgaccacgagattgccgatttgcaggcgaaacgtacccgcctggtgcagcaacatccgcgaattgatgaataagctgaaacggatggcctgatgtgacgctgtcttatcaggccaattgaactcttaaggttcacttaatctctgacgcgcatactctcctccaggttaacggaggagagtgcaatgaaaaaccgtgtttatgaaagtttaactaccgtgttcagcgtgctggtggtcagcagctttctttatatctggtttgccacgtactgatctttcttcagccgtacccaggcccgcgtgccggaagtctcttgccggttttgcaggaaaaactgcccgtgatgcaactgtgtaatgcggctgacaatacttaaccccagaccaatcccgccataacggctgtccatacgtacaaacgctttactcaactccccgcatttactctcatcaatacctggtccttcatcttcaactgccatgaccgctccgtcatcttcttgcagcttaatcataatgttgctgccttgcgggctgtaacgatgggcgttttctaccaggtttcgcaataacatccgcagcagggttgcatcaccctgaacggtgatgtcggcggcgctctctggcaatagcagggtttgctgtcgctggtcgagcatggtactgagttcgtcatagctggggagaatgacatcttccagcagttttacatgttgataattaccggaagaaaaactctgtccggcacgcgccagttgcagcagctgggagacgctctccatcatctgatcaagccgtgccactaacggtgctacatcaatgtgatgcgttttcgccagcagttccagatgcaaacgcacccccgccagtggcgttcgcagttcgtgcgcgacgtcagcggtaaacaacctttcgttatccagcgtgctggtcaggcgactgaccagatcgtttaacgcgctaaccaccgcttcgatttcgagggtggcgctgtgaatggcaatgggcgttaagttgtcggcggtgcgcgcttccagctctttttgcagctccgccagcgggcgggtgatgcggcgtaccgcctgatagcagataaatagcgtcaggctgaccataaagacgccggggacaatcaggctggcgaccgcctcgcggatctcacgcatgatgtggcgatcgttgttgcgattgtcgcgtagcgcctgctcaaacagctgaatctgctcggtactttcatgccatagccagaagacgctgatcagctcaaacaccaacaaaatggccccgatggtcaatatcagccgttggcgcaggcttattggtcggcgcagaaaatgcatcagattcaattagttttcctcattcgcgaccagcatatagccaaagccgcgcacggtgcggatacgggctttgcccactttgtcgcgcagattgtggatatgcacttccagggtgttggtgctgggttcattgtcccagttatagatgtcgttgtagagaatttcccgatgcaccggactgcctgctttgagcattaaccgactcagcagagcatattctttgggcgtcagaatcaactcttcaccgcccatccatacctgacggcgacccatgttcagcgtcagattgccaacaatcagctcactttcgccctgattattatggcgtcgtagcagggcgcggatacgggcatgtaactcttccagcgcaaaaggcttcaccagatagtcgtcggcaccgacatccagcccggcgattttgtcggtcagcgtatcgcgagcggtgaggatcagtaccggcagggtatattttttctgccggatacgggcgagaaaatgcagtccatcttcgtcgggtaaccctaaatccagtaccaccaggctgtaatgacctgcctcaaggctttgttccgccatccgcgcggttgtcacgctatcgcacgcgtagccttcggtttgcgccgccagaatcagtccctgcaataacagcgtatcgtcttcaacaatcagaattttcattcactcactctcctgcaagtttgcagaatatcatccgcagcctggtaatacttcgtctcaacgccagttaatcccaatagcgtggagaataaattgtcttgactatagtgttgcgtttgcgcctgtttttgcaggcagttctggtcaacctgataccgtttttgataatcctcgctcagccacagcagcatcggcacctgtttttggctatccggggcgatggcataaggcagaccgtgcagatagatgccattttcacctaagctttcaccgtggtcagaaagataaaccaggctggtggtaaatttatcctgatgttctttcagcagattaatcgctttatcaacaatatagtcgacgtaaaccagcgtgttgtcgtaagtgttcaccagttgctctttggtacaggtctggatctcattggtgtcgcaggttggggtaaatttcctgaactgaggcggatagcggttgtaataggtcggaccgtggctgccgatggtgtgtaagacaatcacgccatcaccttgcaggttattgatgtactcttcaagcccgtggaacagcacttcgtcatagcattcgccgttgatgcactgatcaggtagattcagcgcggtgacgttctggtgaggcacgcggtcgcaggcacctttacagccgccatcgttgtcattccacagcacgttgatgcccgctcgctgaatgatatccagcacgccttcctggtgctgtgccagctcttctttgtagtgctcacgcggcatatcgctgaacatgcacggtacactaactgccgttgccgtgccgcaagatgcggtattagggaaatagaccacgttatctttcgccagccgcgggttagtttcacgcgggtagccgttgagggagaagttctccgcccggctggtttcgccgacaatcaggatggtcaaatttttacgtttttcgttctgcattaacgggttgcggtgcgcgtcttcaccaattcgcaccagcggcagatttgccagtcgctgatgggagtaccaactccagctggcaacaatgctgttagaggggcttaaggatttcaccagctctttgttattgcggaacaagctggcgtagtctttataaaacagtgcggcgaccagcaaaatcagtagtacagaaaccagaatattggctccacggaaaagaacactgcgcagacggctggtggcaggtttgatttttatccagcaggcaatcagcgcagcaagcacgccgctgaatcccagcgttaataacatttgcggtgtcatcagcgcataactttctgccggagtggtatcaataatattggcaatcatgctgcggtcgatgacgatgccgtaagtcattatgaaatattgtgcagccgcgccaaccagaataaacaggcaggccagtggtcgattaagccataagaaagagcttagtgtcaggacaatattaatcacgctgaaagcgacgaccggcatgctcaagaaaaccagtacgttatgcaggctatccagcggcagcgcctgcaacacctgtttaaaaaaggcaatattcaggcagatagagatataaaaagcggccaacaatagccaggcgagtaaattcaaagagggtctttttagtaggcgcttcaacatcacggtgtttccatcgaacaaagtgcgcatatgctcgcaaagcaaaattaagccaaccttaagttcttaaggttggcttttatgtttgctggattaaggggaattaatctttgcttattggtgcatctaagggatacgggtttttatgtagccggttgtaattcagcgcatacatggcggtgatgaccatcagggtgacaaaactccacataacctctttcgctccggaccccaccacggcccagatgcagtagaggaaggcaatggtagtaactgccagatatgccgggcgtgctttaccaaagtgaccgtgtccgagcagcagtaacgccgcacaggtgtaaagatatggcaccagtgtaaagatgacgctgacggaagaaaccagaccgaactctttggtcgcgtttggactaatgctgctgagctggaagatggtcatcaaaataccgacgataatcagccccgccactggcgtacccgctttatttacacgggcaaaaatcggtgggaacagtccgtcatcggcagcggctttcgccgtttgacccgccagcaacgtccagccgcccagactacctaagcaacccgcagctgcgcagaaggaaacaatggccccggcggtgtcacccaacgccatccgtgcggcatcaccgaatgggctagcagaaacgcgcagtgcggcattagggatcatccccataatcgcggtggtagaaagtacatagcaaacggcggcaatcaataccccaccaatggtggcgatagggacattgcgtttcgggtttttcaccacacctgcggcaacggaggcactttccacaccgatgaagctccacagcgtaacgttaagggtactttgaattgcaccgaaggtgcccaggccgctgacgttccatgccgccatataggtttcaccacggaaccagaaccagccaaatacggcaatcccgacgatggggatcagcgccagcacggtggcaactgcctgcacacgggtgatcattttcggaccgacaatgttcagcaggacgaagatccacagcaccacgacgcaggtgatggttaataccaatggatctttcagaatcgggaagaagtaacttaaatatcctacgccaatgaccaccatggcgatattgccgatccagcaggccagccagtagaggacgttggtttgataaccgagaaacgggccaaagcagcggcgggcgtaagcgtaagaaccaccaggacttgggtcgaggaagctcattttggcgtataccatgctgagccccagtgcaccgataatcgtcaccaaccatccataaatggcaatcccgccagtagaggccaggtttgcaggtaacagaaaaacaccactccccataatattcccgctcaccatcagggtgacggggattaagcccactttgtgagcatcagcatcgctagacataattaaactcctgcgaaggcgagcttcgtgacaataaattacgtcatatcatacgcctgcattcgatagttgaattattatcgaccgggttatcgctgatgccgttattaatatagctcttcgttaaggttaaaaatcaggcgacagtgcgttctctgtgctgactaacataatgcagcggcgtcataccgtagaagtctttaaagacagaaataaagtagctcgtactgttgtagccgcaggactgacttacctgagagatatttttaccgtccatcattaattcatttacggcataacgcatgcggcaggtggtgattatttggctataactggtgttttcgcttttcaactttttctttaacagacttgggctaagacataaacaactggctaccatactaagattccagtctttgtgaatatcgctttcaataatttgataaacgctgtcacttacacaattacgtaacatatacatcattaaactaacgaattttttactgtcgagaaaacgggatagcaccgtgaataataatgcgcgtgttcgttccttttcactctcagtttctgcgggcatcatgctgtgttgcgcggcaacgcgaaagacgtctggcgtcaggcatggcagggtgagtatgggcgtagcgctacgttgccatactggtatttggctgagatctttattcagaaaccggaggtaatctttgatgatgtcgtgactaatatgagcaaccaaagtgttgttaagagaggagacgtcgataatattattttcacaatttaataacgccatatggttagctttaaggctaataggttctttcccattcacccttatccagacatctttttcagtcaataaaacaatacaaggttggtcgctgcaaatcctcatacatgtactcctgagtgcgaataaaagaccagttctcgctaaagcaaagcgataccgggaaatggttatataattgtatgatgaatataaacatgcataaaaataacgagttttactaatagtacaaatttttatagtaatttctcatgtacatatttttttacaggataaataacaggcaaaaaaaagcgcggggtggggccgcgcaaaaagtatgacatttttgtttgcagcaatttttatgaaaacgttgccatactcaaaaggcctaaggccaggcggcgtaatgttatttaaacaattacgccttcagcggaatagtggttacgctttcacgcacataacgtggtaaataccgtcaataatttcagtcccttcagtttcgtgttcaaatccagggaaatggtggtcccaggattgcaggctgcgtaaataacttacttgcggactgtttttatcgccgaagttttcaccagacagcagcatcgggattcctggcggatacgggataacactgtttgccgcgatgcgtcctggcagattttcaatggataccagttcgacattgttgtcgacaatcgcgttgtacgcttcacgcggggtgacttccgccaccggcaggccggaataggcttcgttcaaccgtgcgccagggttgttttctttcagccaggcaaacatggtgtcacccagatcgtgaatccccatgttcgcgtaagtgtcaggatattgttcaacaagttccggcatcacctgcgccagcggtgtgttggcgtcatagtggcgtttgaaggagcaaagggtgttaaccagagttccccatttcccacgggttacgcccatagagaacaggaacataatttggaagtcagtggtgcgggtaggtacaatgccgtggcgaccaagccaggcagtgaccagcgccgccggaacaccggtttcttccagttcaccatcttcacccattcccggagcaaggatgctgactttaatcgggtcgagcatactccagttatccggaatatctttgaagccgtgccagctttcgcccggatgcattacccagcagtcctgaacggtggtcagcagtttggttggtgcgtcagcaaagtcataggttttgccggtttgtgggtcggtgacgacttctttgttccacggtttgaagaaccagctaccgtcagcggtgaactctttatatagccgcgccatcgcctgacggaaatcaaccgcttcgtcaatcacttcctgtgtcagactcaggccgctgttgccgtccatcatgctcaccgccacgtcgttggatgcgcagatggcatacagcggggaggtggtggcatgcatcatgtaggcctggttgaagcgggagaagttaatcgccccacgaccttcacgtacatgaatataagaagcctgactcagcgcattcagcagtttgtgggtggagtgggtggcgaaaacggtaggaccgttgtgatcgccaggttcgccgcgcatggcatagtgatcggcatagatcgggttgaaacgtgcatagccgtaccaggcttcgtcaaagtgcagacgatcggaggttttttccagcagatcctgcgcttctttagcgttataacacacgccgtcataggtgcagttggtcaccacgcagtaagacggtttttgcccggctttgtctttggtcagcgggctttcactgattttcttctgcaaggtttcaggttgcatttcctgcggatagattggcccgataatgccgtagcggttgcggcttggcaccatatagaccggtttcgcgcctgtcagcatcaaaccttgttcgatggatttatggcagttacggtcaacgaccacgacatcgttatcggtcatgcaagcctgcatgatggtgcggttagagccggaagtaccgacgactacgctccaggagcgatcggcaccaaatacgcgtgcggcatatttttcgctttcgccaaatgcgccagtatggtcaagcaaagaaccgagggaagttcgttcgatgcccatgtcggtgcggaacagattttcaccatagtagtcatggtagaaacgtccggcgggtgttttggtaaaaccaacgccgccctggtggcctggcgctgcccaggaatattcatggatgtcactatatttcatcagcgcgctgaacagtggcggcaacagctgctggcggtagcgggtcatcgcggcaacggcgcgtccggcgataaagtcggcggtatcttccagaatccaggcgaattcatcgacaagctccagcaggtcgcgatccattgcggcgagggctttttcccgatcgcccaacaggaagaccggcacgttttgttggcgctcatgaagcttaccgatcaattgtctgacgttttgatgttcgtccggatgttccatttgatagctgaacatcaggcagtcaatggcttcgttactagagagaatggcaaaaccatcatcaaaggaggtggatttaatcacggtaacattttgctggcttaaagcatctgccagacgctcaacggcgttaccgacccaggtgtcttgatggagaaactcgctttcaacaattaatactttcatcattgcttacccggttatgaaggaatcttcgttgcgggcaagtatcttccggccttttcgggctgtaaagcgcgtgaaaaacaaacatttttgaaatatttagttttataaacaatacgttatgtgattattttaaattattttcactgcttattatcgacggctaaactatttttttggctgatactgatatcgtctttagccgggaaacgtctggcggcgctgttggctaagtttgcggtattgttgcgggctcatgccgacatatttgccgaacgtgctgtaaaaacgactactactacgaaagcctgccgtcagggcaatatcgagaatacttttatcggtatcgctcagtaacgcgcgaacgtggttgatgcgcatcgcggtaatgtactgtttcatcgtcaattgcatgacccgctggaatatccccattgcatagttggcgttaagtttgacgtgctcagccacatcgttgatggtcagcgcctgatcatagttttcggcaataaagcccagcatctggctaacataaaattgcgcatggcggctgacgctgtttttgtgtgtgcggctggttttattgaccagaatcggttcccagccagagaggctaaatcgcttgagcatcaggccaatttcatcaatggcgagctggcgaatttgctcgttcggactgtttaattcctgctgccagcggcgcacttcaaacgggctaagttgctgtgtggccagacttttgatcaccatgccgtgagtgacgtggttaatcaggtctttatccagcggccaggagagaaacagatgcatcggcagattaaaaatcgccatgctctgacaggttccggtatctgttagttggtgcggtgtacaggcccagaacagcgtgatatgaccctgattgatattcactttttcattgttgatcaggtattccacatcgccatcgaaaggcacattcacttcgacctgaccatgccagtggctggtgggcatgatatgcggtgcgcgaaactcaatctccatccgctggtattcgctatacaggctcagcgggctgcgggtctgtttttcgtcgctgctgcacataaacgtatctgtattcatggatggctctctttcctggaatatcagaattatggcaggagtgagggaggatgactgcgagtgggagcacggttttcaccctcttcccagaggggcgaggggactctccgagtatcatgaggccgaaaactctgcttttcaggtaatttattcccataaactcagatttactgctgcttcacgcaggatctgagtttatgggaatgctcaacctggaagccggaggttttctgcagattcgcctgccatgatgaagttattcaagcaagccaggagatctgcatgatgtctgcacccaaaattacatttatcggcgctggtagcacgattttcgttaaaaatattcttggtgatgtgttccatcgcgaggcgctgaaaacggcgcatattgccctgatggacattgaccccacccgcctggaagagagccatattgtggtgcgtaagctgatggatagtgcaggggccagcggcaaaatcacctgccacacccaacagaaagaagccttagaggatgccgattttgtcgtggtggcatttcagattggcggttatgaaccttgcacggtgactgatttcgaggtctgtaagcggcatggtctggaacaaaccattgccgatacgttggggccgggcggtattatgcgcgcgctacgtaccattccgcatctgtggcaaatttgcgaggacatgacggaagtctgccccgatgccaccatgctcaactatgttaacccaatggcgatgaatacctgggcgatgtatgcccgctatccgcatatcaaacaggtcgggctgtgccatagcgtgcagggaacggcggaagagttggcgcgtgacctcaatatcgacccagctacgctgcgttaccgttgcgcaggtatcaaccatatggcgttttacctggagctggagcgcaaaaccgccgacggcagttatgtgaatctctacccggaactgctggcggcttatgaagcagggcaggcaccgaagccgaatattcatggcaatactcgctgccagaatattgtgcgctacgaaatgttcaaaaagctgggctatttcgtcacggaaagcagtgaacattttgctgagtacacaccgtggtttattaagccaggtcgtgaggatttgattgagcgttataaagtaccgctggatgagtacccgaaacgctgcgtcgagcagctggcgaactggcataaagagctggaggagtataaaaaagcctcccggattgatattaaaccgagtcgggaatatgccagcacaatcatgaacgctatctggactggcgagccgagtgtgatttacggcaacgtccgtaacgatggtttgattgataacctgccacaaggatgttgcgtggaagtagcctgtctggttgatgctaatggcattcagccgaccaaagtcggtacgctacctagccatctggccgccctgatgcaaaccaacatcaacgtacagacgctgctgaccgaagctattcttacggaaaatcgcgaccgtgtttaccacgccgcgatgatggacccgcatactgccgccgtgctgggcattgacgaaatatatgctcttgttgacgacctgattgccgcccacggcgactggctgccaggctggttgcaccgttaaaacgcgactaaacgctactgcgccgggggatttattccggcgcacacctctgacgataccaataacagaaggcgggcgttggtaacagcgacccgataccctatgagcatttcaatgactacaaaactcagttatggatttggagcgttcgggaaggattttgcgatcggcattgtgtatatgtacctcatgtattactacaccgatgtcgtcgggctgtctgtgggtttggtcggtactttgtttctggtggcgaggatctgggatgctattaacgatccgattatgggatggattgtaaatgctacgcgaagccgatggggtaagttcaaaccctggatcctgatcggtacgttggcaaactctgtaatcttatttctcctctttagtgcgcatctgtttgaaggtactactcagattgtctttgtttgcgtgacctacatcctctggggcatgacttacaccattatggatattcccttctggagcctggttccaaccatcacgctcgataaacgtgagcgcgaacaactggttccttatccgcgtttttttgccagtctggcaggctttgttacggcaggtgtgacgctaccatttgttaattatgtcggcggtggcgatcggggatttggctttcagatgttcactctggtactgatcgccttttttattgttagtaccatcatcactctgcgcaatgtgcatgaagtctttagcagtgacaatcaaccgtctgctgaaggaagccatctgacacttaaagccatcgttgcgctaatttataaaaacgatcagcttagttgcctcttgggtatggctcttgcttataatgtagccagcaacattattaccggctttgctatctattatttcagttatgttatcggtgatgcggatttgttcccctattatctgagctatgcgggagctgctaacctggtgacgttagtattcttcccacgcttagttaaaagtttatcccgacgcattttatgggccggagcatctattcttccggtgttaagctgtggtgttctcctgttaatggcattaatgagctatcacaacgtcgtcctcattgtgattgcgggtattttgctgaatgtgggaacggcgcttttctgggtattacaggtcatcatggtggcagatatcgttgattacggtgaatataaactgcacgtacgctgtgaaagtatcgcttactccgtgcagactatggtggtgaagggcggtagtgcctttgcggcttttttcattgcggttgtgttagggatgattggctatgtaccgaatgttgaacagtctacgcaagccctattaggtatgcagtttattatgattgctctaccaactctgtttttcatggtaacgctgattctctacttccgtttctatcgcctcaatggtgacacgctgcgcaggatccagatccatctgctggataaatatcgcaaagtaccgcccgagcctgttcatgctgatattccggtcggtgcagtgagtgatgtgaaagcctgacgtggacaatagctaacgaaaatggcctgatgcgatatgtttatcaggccacgtcttaatgtaatgctttggatttgcaaattttgtagaccggataaggaattcacgccgcatccggcatcaacaaagcgcaagttgttatccggttatcaagccaaagcgccgtagctggcggcaatgaaagcgagcgaggaatatcaccgtcgttaatgcgccaagcagcgcgcagaacatatcggattgcgtgtcccactggtcgccctgggtgccgagaaaatcatccgctccctgacccattgccagcgctgcccaccactcgattaattcatacatcgcgcttatcgccagcgccacgcagcagaccaggaacgccaccattttacgtccgcgcacgtacatcccgcgaacgagaatttctcgtgccaccagtgcaggcaccagcccctggaaaaagtgccccagcttgtcatacggattacgactcaaccccagccattcctgcacctcaaaaccaacggggactttcgcgtaggtgtattgtccgccgaccatcaggatgatggcgtgaaggaaaatgagcgtatagagcagcggcgttaacggataacgtctggcggtggcaagcagtagctgcacgacaataatcaccggtgtcacttccatcagccaggtgagtttgtcatgggcgctaatgccggtataaatcaggattaacgttagcgtcagtgcgctggtgttaagaattaacggcttgagtgtgcgggtcatggtgagttcgcaaatcagggaaaatactgactattcaccagcaagcgtgaaattacaatcgcaaaagaggtggccagggggatcacctggcagcatgctgccaggcgctgggccgaagaggttacttagtgcagttcgcgcactgtttgttgacgatttgctggaagaagtcgttacctttgtcatcgaccaggataaacgccgggaaatcttctacttcgattttccagatagcttccatacccagctccggataagcgacgcactccagatgcttgatgctctgctgcgccagtaccgccgccggaccgccgatgctaccgaggtagaagccgccgtgtttatgacacgcgtcggtaacctgctgactgcggttacctttcgccagcatgatcatgctgccgccgtgggattgcagcagatccacgtaggagtccatacggcctgcggtggttgggccaagactaccacttggataaccggcaggggttttcgccggacccgcgtagtagatcgggtgatctttgatgtactgcggaagttctttaccggcgtcaatcagctctttcagcttggcgtgtgcaatatctcggcccacgataatggtgccggtgaggctcaaacgagtggataccgggtattggctaagctgggcgaggatctctttcatcgggcggttaaggtcaactttcaccgcttcgccttcaccggcctggcgcagttcttgtggaatgtactggcctgggttgtgttccagtttttcgatccagataccttcgcggttgattttcgctttaatgttacggtcagcggagcaggagacgcccatgccgaccgggcaggatgcgccgtgacgtggcagacggataacgcgaatgtcgtgcgcgaagtatttaccgccaaactgcgcgccaagaccgagtttctgggcctcttccagcagttcctgttccagctggacatcgcggaacgcctgaccatgttcgttcccttccgtcggcagttcatcgtaatagtgagcgcttgctaacttgacggttttcaggttggtttccgcagacgtaccgccaatcacaaacgcgatatggtacggcgggcaggctgcagtaccgagggtacgcattttctcgacgaggaagtttttcagtttgccgggagtcagcagggctttggtttcctggtagagatacgttttgttggcagagccgccgcctttcgcaacgcaaaggaatttgtactcatcgccatctaccgcgtacaggtcgatttgcgcaggcaggttagtgccggtgttgacctctttgtacatgtccagcgccgcattctgactatagcgcaggttatcttcgatataggtgttatagacgcctttgctcagcgtttcttcatcaccgccgccggtccacacgcgctggccttttttaccgacgatgatcgcggtgccggtatcctggcaggtcggcagcacgcctttggcggcgatttcggagtttcttaagaattgcagcgccacgtacttgtcgttttcgctggcttctggatcgtgaagaatagccgcaacctgtttctggtgtgccgggcggagcataaaagaagcgtcgtgaaaggcttgctgcgccagcagggtcagggcttctggttccactttcaggatggtttcgccgtcgaagtcggcaacgctaacgtaatcggaagtgagtagatagtattcggtattgtctttccccatcgggaaaggtgcctggtagataaagggtttgttactcatagcttccagcctgtaactctgtatttgttattcgaaaatggcgtgccgcgtagtcacgggcggcacgcaaagtgcatttataagaacccgtacatcgcggcgaagatccagccgaagacgcagcttacgctcacaccaatcaaccccggcagaataaagctgtggttgatgacgaagcgaccgatgtgggtggtgccggaacggtcaaactgaatcgctgccagatcgctcggataagtcggcaggatgtaataaccgtagcaagccggtgcactagccacgatgtatgccggatcaacgccgatcgccagcgcgaccggaacaatcgccgccagcgccgcagcctgagagtttacaaacttggaaaccagcagcagaacaatggcataggcccacggatactctttcaccatttcacccagtacgccctgaatttcagacatatgcgcaccgaacatggtttctgccatccatgcgataccgtacaccgccacgatggcgatcataccggaacggaagacttcgtttttactgatagacgcgggattggttttggtcaggataataatcagcgccccggtcagcagcataaacatctgaataaccagtaccatgctcagcggtttgccgccgaaggatggacgcaggtcgctatcagcaccaagaagggcgactacagcgattgccccgaggaaaatccacattgccagccagttgcttttcggcagttttttatccagcagcgtcgcggtatcaccgtaaacatactcacggttttccggtacggagatgaatttctggaactcttcgtctttatccagatctttaccgcggaaccagctgaagataccgatcgccaggataccgattaacgtgcttggaatggtgattgccagcagatcgaggaactcaagatggcgaccatcaaaggtgacattacccagcatcgcaaccagagacacgaccgcaacgctcaccggactggcgataatccccatctgtgcaccgatagaacttgccgccatcggacgttccggacggatgttgttcttaatggcgacgtcgtagatgatcggcagaatggtgtaaaccacatgacccgtaccgcaaagaatggtcagtgtacaggtcacaaacggcgcgacaatactgacatatttcgggttgcggcgcagcagcttctcggcaatttgcagcatgacatcaagaccgccgctagcttgcaaggtcgcgcttgccgccaccaccgcaatgataaccagcatgacatcaactggtggtttacctggctgaaggtggaagacgaagaccagaatgaccagaccgataccgcctaataaacccagcgcgataccaccctttctggcaccataaaacagacatatcagtattatgataagttggatagtaaataacatgtgtgaaccctcgcgataatcctatttaaatttttgctgaatagatcacagtcacgttctgttttgtatgaactgttttcagagcctgactaaatatccgtttggtcgttaccggctttagcaaatacctcacagtgaatattggctgattaaagcagcggcaaatttatgcactgtgataagcggctttttcagagagaaagactctctggcgatgggtttatagtttgtactgcgcagatgttaatgttttgtttgctgttatcttattgatatttatcggtctattttttgttctcagggcagatgtcattaggtttatagattaatctgatctacccatttgtgggtaaaaatacacataatgcgggtgacataatagttaattaacttttgttagcgttttgaaattaaaaacaccgttcacctgaagagatattaatttttagcgatgatggagggataattatatttgatctggcacaagttttactgatgaaggatgtaacttgtgccaggggtattttgcattacggtaataattattacttacagataaccagcgatccgttattggcaatattgtttcagtagactgtagtgttctgcctgaatacggtaacggtaaactggacgccccgtgacgccataatggatactggtgaacaagatgtggcagttgaccagccagatgaggtatttacggcaggaaacacggctaatgttaacctcgttggctagctcgtcggtactaaattcatagtcctggtgcgcgtcaatccactggcacagtgtgcgtaacgtctgcggcgttaagccttttggcaagcgacgaggatcctgttcgttggagctgctgccgtggattagctgatcaagctcggcctggtcataatactgatgtttttccagcgccattttcttttgccgccagccggtgagcgcctcttcaaagcgggaagcctggaagggtttgatcaggtaatccacgacaccgtaatgcaggctatctttaatggttgccgcatcggctgcggaggagatgacaatcacatcacttttgcaacgcgcgttatgcaggacaggcagtaaatcgagcccgttctctttttgcatatagatatcgagcaatatcaggtcgataggcgtatcgctattgaagataatctctttggctttctccagcgtgctggctgttccacagcattgaaagcctgggatttgtgctacgtatcggcgattcagctccgcgaccattgcgtcgtcatcgataattaatacattgatcatctgttgctcctctccccgtcccagggtatctggacaaaaaattgtgtgaaaatcccgggttcgctttccacggcgatgctgccgccgagattttctacctgttgtttgacaagtgctaaaccgacgcctcgctcgcttccttttgtgctgacacctttgtcaaaaatgtgatcgattttatcgggtgcgatccccggtccatcatcattaacttcacagtgcagccagccgtgacggtagtgcaatgttacgctaatttcgcctccgggttccggccctaatgcctccagcgcgttttctatcagatttcccaacgtggtaatcagcgtcgcgacctggtcctcactgccgctgtctggcagctggctttcactgtttaaaatcagcgtatggcctaaatcggtcgcgcggttaatcttgctgattaaaaaaccagcgataaccggagatttgatcttacccagcagagagccaatctcttcctgatagttattggctgttttgagaatgtaatcttccaactgcttataactcttcagatgcaataatccgagaatcacatgcaatttattcataaattcgtgggatcgttcacgaagtgcgtcagcatagttgaccagaccgtcgagtcgctgcatcagtttacgtacttcagttttgtccctgaaggtactaatggcaccgatgataacgccattactgcgcaccggaacggtgttgatcagtaatagccggtctttaatcgtaatctcttcgtcgcggcgcggggtaccgtcgcgtaacacttcgctgacatctaccacctgactccaactgtggcttagcgtgctcagtttctcatcgtcctggctcttacggtaattcagcaattcttgtgcggcatcgttgatcagcgtgacctcgccgcgatcgtccacggcaacgacgccttctttgatagactgcaacatggcctggcgttgctcaaacagcgtggagatttcgtagggttccaggccgaaaaggatttttttcagtaccttaaccagaatgcaggtgccaatcagtccgaccagcatgccaaataatacgctccagataatgctccagcgactgtcattgatctgttgggtcacacggcttaactcaaggccgatcgccaccacgccaatttgtttatgattttcatcgtagatgggggtaaatacgcgtaaagcctgcgccagaaaaccgcgattgatagcgacattttcttcgccattcagcgctttaaggatgtcatcacctttaaatggctgaccaatacgctgggcttcaggatggctgtagcgaagactttgcatatcggtaacgacaataaacagcagatcgttgcgtttgcgtacggcttccgcgatggcctggatgccactctcctgcggttttttctgcaagccctgacggatttccgggctgtcggcgagggtacgcgccactgccagtgccttgttggctagcccatctcgcgtcatatcactgatttggctgaagtaaatcagatgcaccaccaatagcacgctgaacagtaccgcactgaccattaagatcactgtggtactcaatttcatcggacgtttgcgtaacatgcggtagggcaaactatgtctcatcagcttccttgtgtgacaaatttcttaagcattatctctgatgaggcgggtaattcaaagggagtaagaatgattggctatataggggaagagactctggcaacggaaactgccagtgctgtatgaagattccggggctatgcttatagcgataatcatactgatgagagagggaaggtcatggatcaggcgctactggacgggggttatcgctgttataccggcgaaaagatcgatgtctatttcaacactgcgatatgtcagcattctggcaattgcgtacgtggcaacggcaagttatttaatctcaaacgaaagccgtggatcatgccggatgaagtcgacgtcgccactgtggttaaagtgattgatacgtgcccgagcggcgcgctgaaataccgtcataaataagcgagggtaaaatggaaatacgcgaaggccacaataaattttacattaatgacaaacaaggcaagcaaatcgctgaaattgtctttgtgccgaccggagagaatttagcgattatcgaacataccgatgtcgatgaaagcctgaaagggcaagggattggtaaacagctggttgcgaaagtcgtggaaaaaatgcgtcgggaaaaacgaaaaattatcccattatgcccatttgcgaaacatgaatttgataaaacgcgggagtatgatgatattcgcagttgatgggagagtacagagtcacgatatttttcattctctccgcgatgtgatgcaggagagcatctgaagggtagggggatgcacaaagaatgggcagagagcgcgtttttttgtcccaagtcatcccctttactgagcaaaaaaaagaatatctcctatatgagaatcatcaatcggggttaataagttttgcgtccccagagcgtttaatattgataggagtcatattatggaaggtaaaaacaagttcaatacttatgttgtttcttttgattatccaagttcttattccagtgtgttcttaagattaagaagtttgatgtatgatatgaatttctcctctatcgtggctgatgaatatgggataccacgacaattgaatgaaaactccttcgcaataacgacaagcttagccgcaagtgaaatcgaagatttaatcaggctcaaatgcttagacttaccggatattgattttgacctcaacattatgacagttgatgactatttccgtcagttttacaagtaaccaggaaggataagaagaacataaaaaatggcactattctctaaaatattaattttttatgtgattggtgtgaacatatcctttgtcattatctggtttatcagtcatgagaaaacacatattcgtttacttagtgcattcctggtcggaataacctggccaatgagtctgcctgtggcattacttttttctctcttttaagagctgtagttgagtggacccgctggttatcgtgaaacgaagcgtctctcctcaaaactggatttgcggaacgatgaacgaagcagtcgcctgactgcttcgttcattaaagtgaaatttatttctgtgggcgcatcgccgggaagagaataacgtcgcgaatagtatggctgttagtaaacagcataatcattcggtcgataccaatacccagaccagcggttggcggcagaccatattccagcgcagtcacgtaatcttcgtcatagaacatggcttcgtcgtcacctgcagctttagcattaacctgttcctggaaacgttcagcctgatcttctgcgtcgtttaattcgctaaaaccattaccgatttcacgaccaccgatgaagaattcaaaacggtcggtgatttccgggttaacatcattacggcgtgccagcggggacacttctgccggatattccgtaataaaggttggctgaatcagatgtgcttctgccacttcatcaaagatctctgtgacaatacgtcccaacccccagcttttctctaccgtaataccgatagattcagctaatgctttagcagcatcaaaattatccaggtcggccatatcggtttctggacgatattttttgattgcttcgcgcatggtgagtttttcaaacggtttgccgaaatcaaacacatgctcgccataagtgactttagtggtacccagaacctcttgtgccagggtgcggaacagactctctgtcagttcaatcaaatcgtggtaatccgcatacgccatgtagagttccatcattgtgaactcaggattatggcgaacagaaataccttcattacggaagttacggttgatttcgaatacccgttcaaaaccgcctacaaccagacgtttcagatacagctccggcgcgatacgcagatacatatctaaatccagagcattatgatgggtaataaacgggcgagcagatgccccacctggaattacctgcatcatcggggtttctacttccataaagccgcgcgcgaccatgaattgacggatagcggccagaattttactacggacaacaaacgtttgacgggatttatcgttagcgatgaggtccagataacgttgacgataacggacttcctgatcctgcagaccatggaatttatctggtaaaggacgtagtgctttagtcagcaggcgcagctcagtacagtgaatggaaagctcacccgtttgcgtcttaaacagcgtaccgcgggcaccgataatgtcacccagatcccattttttaaactgatcgttataaacaccttctggcaggctatctcttgcaacgtacagttgaatacggccaccgacatcctgcaacgttacaaaggaggctttccccatgatacgacgggtcatcattcggccagcaacgctgacttcaatgtttaaggattccagttcctggttatccttcgcatcaaactcttcgtgcaactggtcagaggtatggtcgcggcgaaaatcattgggaaacgccacaccttgctgacgtagtgccgccagtttttcgcggcgatttctcagttcatcgttaaaatcaatagcctcattggctccccgtgtttcttgttcagacattttggttcctctaaatccagctttcaatttagcgtagataaagagacagatcggtacactgtattatctgcctcgactattagtaactcagtttatcttatcgaaactaacgcttacctcaagttgatatcactaataaataaccatcaaaatggtttaaatgacttattaatctcgatttgttagtgttataaactaaaagttaatttattcataaccaattgtttttacgacagttaatcgttgctctcctgtatcatattcgtcggcgtgctaaacagaaaacgggtagcaaaggccaatacgacgatgatcgcgacacaagccaacgtccactctcccatctgagaaaagaatcgctggtaagctgcaattgccataccgctaatttggctctctgtcgtctgctgtgccacgacgcctgccagccagttggcgaccgcgcctgttgccagcatataaatcccggttaatacgccagacattttcagacgcgtgatttgcgcaatcgccaccgggtcaataaagagttcggcaaagcccattagcgccagcccggatatcatcacgcccatactcgcttgaccgtcagccgctgcatgtcgggcatcaaatgccaacaacataaagccacaagccatcagcagtaagccaaaggcaaacttcagccagacgcgcaatgtactgttgccgcggctttctgggctcgccagccaggccagtacaaccccagcgagcatcaccgcaattgcattcacgctctggaatagtgctgtaggtacttcaatattgaatgcctgacgattcacaaagcgatcgataaacaagctgatggtactgccgccctgttgtgccagtacccagaacaatgtcccgacaaacatcaacaatacaatttgccaaagagcacggcgatgttcggggaatttgatcatcatgcgggcaatgatttgtgcggcaatgaggcaaacgatcgccagcaaatatccggaccagtcgttctccagcagcagagtaaaaaatactggggctaaacagagcatcaccactaaccagctccatactggtaaggcaaatttgacactagtgagcgcttttttatccatactacgtgtggactggaaatgacgatgaccgcttaagaaaatcaacaaaccgataaacatgccgccacccgcaagggcaaagccaacatgccatccataccactgagcagccaggccgcaggcgattggggctgcgatagaaccgatattgcccgcagcatacagcaggctaaaaccgccatcacgtcgatgatcgttctcgtcgtagagctcgccaagcaaacagctgatgttacttttgaataaaccgtagccacaaataatgattgccagcgccagatacaggctaaaggtactatttgtatcaatacccagcaccacatggccaagggtcattaacagcgcgccggcaatcactgcagtgcggttgccgagcaggcggtcggcaagccagccgccgagaataggggtaacgtaaaccagagaagcatatgcgctgaacaggctgatggcatggttatcatcaaaaccaagctgatgggtgagatagagaatgagtaaggcacgcatgccgtaaaaactgaagtactcccagatttggatcgccacgatatagtatatcgcgcgcggctgactgggtgttttcatgtgttctccttatgagcaaaaaagggaagtggcaagccacttcccttgtacgagctaattattttttgctttcttctttcaataccttaacggtatagcggccatcagcctgacggtatgcaccgtgaatatcggtttcaaagcccggatagtgagcgccgatttcacacagcatctgcaggaactccagaaccggacgactttcttcggtgatcatttcacccggcattaccagaggaactcccggcgggtacggaaggatcatattggcgttaatacgacctaccatttcgtcgaggtaaacttcttcggtcataccgtgcagctctttctggaatgcagcatacggagtcattaccatcgtcggcagcacttcaaatgcgcgatacatcagatccggcagattgtggtgaacaatcagtttgtggatattctgagccagttcctgaatacgcatgttttcatagaattcaggatcttcacgatacagagacggcagcatgtttttcacacgcaggttcaggtcgaacgcacgtttaaagtcagtcagagcacgcagcaggctcagtgctttggtcttatcgataccgatgctgaacaggaacagcaggttatacggaccggttttctcaacaacgatgccatgttcgtcgaggtatttcgccacgatgctggccggaataccaaagtcgctcatggtgccgtctttttccatccccggagtcagcagggtgactttgatcgggtcaagatacatgtgctcgttatcgatgtttttgaagccgtgccaggtgctgtcagaacgcagcggccagcattcagtcgtatcgatatgatccggctgccatacatcaaagaaccagccatcagattccgttctcagacgtttgatctctttacggaatttgatcgcacgttcaatagaaccgttgatcagacgcttacctgcattgcctttcatcatcgccgcagcggtttcagtggacgccacgataccgtagtgcggagaagtggtggtgtgcatcatgtaggcttcgttaaaggtttcttcgtttacgtcacctttaacgtggatcatggaagcctgagagaacgccgccagcagtttgtgagtggactgggtttcgtaaatcactttcccttctacacggccaccgctcataccgcatttaccttcgtaaatcggactgaagttggtgtaaggcacccacgcggagtcaaagtggatggatttcacatccagtgttttcttgatgaagtcggtgttgtacagcagaccatcataggtagagttggtaattacagcatgtaccggccaggttgcgtttggtgtttctttcacgcgcttagcaatggtagcgtgctggaattcactctgtgggataccaccaagaataccgtaagcgttacgggtcgggcggaaatagattggcgtaacatcgctcatcatcatcaggtgggtcaggcttttgtggcagttacggtcaatcagaatggtgctgcctgctggagcagagtacataccaacaattttgttcgcagtggaagtaccgttggtcaccatgtagctgcggtctgcgttaaagacgcgagcgatatactgttctgcttctttgtgtggaccactgtgatccagcagagaacccagttcagatacactaatggaaatatcagatttcatggtattcggaccaaagaaatcatagaacaggctacctaccgggcttttctggaatgcagtaccgcccatgtgaccaggagtacagaaagtatatttaccttcacgaacatatttaaacagtgctttagtcagcggaggcagaatagtgttgatatattcgtcagtggtctgcttgatcttattagcaatatcttcagcagcacccagcgcatattcaaagaagctaatctgtaaacgcaggtcattcaggcttacatcgagagtggaatacgtattagcgaacgcgtacaacggcaggttctcgttcattttgctaatttcttcgcacagctcgagattatatttatcccagtcaaaaataacgccgcacagacgcgcattgttttcgatcagttttaataagtcgtcacggtcgttcgggtaaacaatctggaagttcagacgttcaagcgcgcgatgaagttcacggatgggttcttctttaaaataaacccccatgtgattcaatattgcaataacgttcatagtcatatctccaggtaaaaaaggcccctcccaacacatgggacaaaatgaaaggaggagcctcggaaaatacttttaattaatgtgcgttagacgcggtgtggttatccatactgtggctctggcgctcgtgcattttgcgagcgtagaacatcaggataatcaggctgacgatgaaggtacctgccagctcgaaggagcttgcgcccatcagcgcgatgaagcagaacacgcaacccagtacagagcagatcaggctgacaaagttgcggatgttaacgccttcaaaacgaatcaggtcaacgcaagagtagaaatacggcagcatagtcagcagtactgcgataccggtcagttcaccgaacaggtcagatgctttaccaccggcagagttcatcagagtgataaggatcatcagggcagtcattttcactgcagccagcagcagaccttttttcggaataccgttgctgtcgacttcaccataaactttcgggaagttaccgtcgttagcggcacgtacacctgcctggcctaccaacatcatccaggagcccagagaagtcaggcacgcaaaggcggtgaatgcagaaaccagcggcgcagcccagttaccgaggatagtactagcactgattgcaaacggagcaccggaagccgccattacagaagacggatacataccggaaagcacctgagtcgcagcgatgtaaacaatacctgctaaaccagtacccagcatggttgccagcggaacggtacgtttcgggtttttaaccataccagtacttacagctgcggattcaacacccacgaaggcccacaggcagagcagaatacttttaatgatcgcatgaccatcagtggtatccgcagtattccagttagctgcataagttgccgcatcaaaccaatgccagccaacaatagcagtcatcaccacaggaataagaaccagcaccagaccaatagtggttaaacggcttacccaagtaccgccgagcatatttacaaaggtaaatacccagacgatagcaatacaggcgatacccgccggaacaggatcatttaatactgggaagaaggtggaaagataagatacagcggtaataccaatcgccaggttaccaatccagttagcatggtaataaagaacacctgtctgaaaaccaaatgcaggggaaatttctccggcataagcaattgggccaccttgttgcgggttttttgttgccagtcgggcatatacatacgccaggctcattgcaccaataatagagataatccaaccccagatagcaataccaccgatacttgctaggttcgcaggtaataatgcaataccgctccccatcatattaccggcaacaacaccggtacaggcaaatagcccgatcttcttggcagaactcatgctcttctcctaatttcatttttgaatttggagtccgggtcatgatgtataactatttcctgaccagaccaaactggcgataagattactcacgaaaaaaggattaatcctaaagattaggtgaaataacacaaaagtttctgtaagtgagaacttgaggttttttattaacacatcaggatcgcaagttgatatcatgaaaagataaacatttaatgtttacaatggattgcgtgacattctctggttaaatttatgtaataaaaattatgcggcaaataaattgccgcaacatattataccaacaggaacatacaaaaactcaacaacaaatatttccgagcataaatcaacccggagttacttattcactagcaagaaatttgtcgagataaggtacaacataaggaacagaagtctggaatataccattttcaatccagtaaagggtgtttgcccctgggcgtaaattaaaggcggtgagatatgcatcagctgcttcccggttcatccccttcatttcataaaccttgccaagcaacacataatttagccaggacatttcaagatcaatgccagtatttatcgcctggtaagactcatctgttttaccttttaccagagcactgaccgcttttatttgatatataatggacaggttgttcaattccggcagtgtaacaatgttatctatttctgtgttcagtgctgctaattgtttttcatctaaaggatgttgagaatggcgcacgatatcaactaatgctttttctgctctcgcgtaggtaaattctggggaactttgaacaatctcacctaataattcactggcacggttcaaacttttatcatcgccatgcagtaaataatcatgtgcctgataaaaattagttaataacgcaccacgatgcggcaaaattttctggagcgtctcctgcattcgttgtggccacggttggtttaacgctttacttaaactctccagtaaatcattttgaatcgccagctgattaccgttagtgatgacataacgtttatccagcatggtactaccatctgcattgtctaccaattttatgctcataaagcattgttgagcacggtattggcgctgattaacaaacgcaatagataatgttttaccggaactgctcggttcatcaatgttgtagttgattttgtcatgcaccataaaggtggagaaggtgttaagacttgtcgccaccaaatcacccacgcctatcgcgtaagagagctgatacggggaactccagctgttacaacttttatttaccatattaatgtcaatatcgcgtggattgagcaaaatacggcttttgctcataggaagacgtgtatcaagactactaaacgctaccagtgctacacagatacctaagctcaacaggaaaaaaaaccatacccaaaaggtagtgaatcgtttgcttttaactggggattgttcaggtggcgttgcggtgttttgaatgttaagactgtgggagggagaatctgtggcaggaaccgcctctggtatagggggagggctagatagcattatttcctctccctcttcttcgctgtaccagataaccggcaccattaatttatagccgcgctttggtacagtagcgatatagacaggactatcttcatcattatcttttaaactcttacgtagttcactgatactctgcgtcacaacgtgattggtgacaatacttctcttccagacattatcgataagttcatccctgctaagtacttcgccactgtgttgagcaaagaaaaccagaagatcgattaatctcggctcaagggtaagttgacgcccattgcggctaatttggtttatggacggagtaacaagccattcgccaacgcgaactacaggttgttgcataatagaaactcattcgaaaagggaatgatgcaatgataattgccacaacctatttttaccatctatagatgggtttatttacatattattggtgaatgcaagacgttatttttaccagccataaacttcttgattacatagtattacgaaaggattttactgagaaccagaagtaatattccttaccatcaaaattcatcatctttgccaaagaaaaatgttcagaaaataatccatggaaaattgtccggagcacttactattttaatggattgttagtctttgcatgagcaagcgaactgatacatttctctttgttctcattcagaaaatctcatcagtcgccgttcagaccggtgttgtgctttatggatgcgttacgctcctgatgacgtcatttgacgttcaacagcatcacggggccgcacgacatttcacgtcagttagtgctatagctcaggaacaaattttcccgaattgggatatgcccgcaaattgctggtgatgtggggagaatctggttgagttcggtagaattgatttggaggcagaacgcttaaatcgtggcgtcctgaaacgaaaaacggacctccgtggaggtccgtttatatgaatttggtgcccggactcggaatcgaaccaaggacacggggattttcaatcccctgctctaccgactgagctatccgggcaacggggcgcattaaaccgtaatctgcacatctcgtcaacctaatttcagtaaaagcgattcaactgcttaagattgcggcaaatcgcttcttttctgtgtttctgtcaggtcaatgcaccaccctggcggcagcgggcgaagcgcaggatatcttccgccagccgatgtgcagtgtcgacatccgcctggctacgattcaccagcattcggcttaaacagccttccagcaccagttccatctgctttgctaccatcgccggatcgtcaacttccagtgtggttaacagttcgtgggtgaaatcgtaggccgcgcttttttgctgatcggccagttgatgaatagggtggccaggatcgggataaaacgtacaggcagcgataaatagacagcccggatagcggttgtttttaacgcactcgcttaacgcctgataacgtgccagcagcttttgttcggcggtttgcgtttcgtccagcatcagctgacgacgccagacatctatctgttggctaagataacgcagcgcatcgtagaggattgcctctttgtctggccagaagcggcgtagctcgtccagtggataatccacacgttcagcaaccatctccagcgtggtgttggcaatcccttgtaattctaataatttcagggcttctcccagtacatcttcacgttgcacgctattttcctccgtctttcccactgcaagtgtcgttcacggttggcgatcgcgcaaatgtgcgctgaaggtttcagcatccataaagcccgtgacgcgtgcttgtggatgctcctggccttgtccgtcaaaaaagagaattgtcggtaggccaaggacattaagatgctttaacagcgccacatcttgtgcgtcgttggccgtgacgttggcctgaagtaagaccgtgtctgctaacgctttttgcacctgcgggtcgctgaaggtgtatttctcaaactctttacaggcgacgcaccagtcggcataaagatctaacatcaccggtttgcctttggcttcaacgagcgcctgatttaactcatctaccgttttgatttgtgtaaagttgagatgcgtctgagtttgcgcggtatgcgtcgcaccaaatgcccaatcctgaagtgggcgcacgctaaccaatgccgctgccagcagaataatttgcacaatacgcatccagccgcgtttagcctgtaggctggtgataaaggcccagccaaagaatgcgacacccagcgcgctccacaagcgtaatccccatacatcaccaatcactcgctccagcaggaagaccggcagtgcgaggatcacaaaaccaaacgcggttttgacttgttccatccacgggccgcttttcggcagcaagcggttaccaaagacggtaattagcatcagcggcaggcccatgcccaacgcatagagataaagcgtgccgccgcccagccacatgttcccgctttgggcgatatacagcagaatcgcgctaagcggtgcggtggtgcatggactacagatcagtccggcaatcgcccccataacaaacacaccgccaggactgccgccctgttggcgattgctcatcaacgtgagacgtgtttgcaggctagaggggagttgcagggtaaacaagccaaacatactcatcgccagcaaggtaaagacgatggcgaggccaatgagcacgtatgggtgctgtagcgccgcctggaactgtaaccctgcggcggcaaccaccagacccagcgccgtgtaggtcagcgccatcccctgcacataaataaaggtcagcaacaatgctctggcagtggagagccgctgtttaccacccagcacgatgccagaaatcagtgggtacattggcagcacgcatggcgtaaaggcgataccaataccgatcaacaacgcccagagcgcggaaaagggcaattgcgcggtgggctgctcttgctgcggaacagacacaggctgtggcgctgcgttgttggcgaccacttcgcttaacggaacggttttggtttctggcggataacagaaaccggcatcagcacagccctggtaggtgacagttaacgtcgctcccgcactcgcctggttgatggtgacgggaagcgtcagccgatcgcggtaaatctcgcttttgccgtaaaactcatcttcatgccagacgccttgcggcagctgcacgtcggcaattttcgcgtgttccggcgtaatgcggatctgtttacggtagaggtagtaaccgtctttgatctgccaggtcagattaaggtcatgttggttttgctgaaaatcaaaagcaaaggcttgatccgcggggacaaattgactacgtcccggcgcgtcgaataatccggcaaaaacggaagtgctgcaaagtagcaggatcagcgtaaagatgcgttgagccatgagaggtaatctgtgtctccttatgtcagcgtaaagatgcgttgagccaactgaggtaatctgtgtctccgtgtgtaacaggtaaaaccagaagttccggggtttgatatggatgatgagacttcaggcattccagcagtgcctgctggtgagatacggtagtttttaaaatcatctgcacttcgtattcttgctccagcttaccttcccagtaatagagagaggtagcgccggggatcaaggtcgcgcaggccgccagtttttccgccagcactttggcggctaaatcctgggctgtcgcttcatctggtgccgtacatagcaccacgacagacgcggtattgctacttttttcatcaagcataaacacctcgcaagaacagatggaaccgcaagagagaggtcactatacaacggacgggggaaggatgttagtcggcgggaaagaaagcggggcgtgaacgccccgcgattgatcattacagcatgaagctacccagcacgaagccgaagcaaacggccagggcaacacccagagtacccgggatgaagaacggatggttgaagacgaatttaccgatacgggtagtacccgtgtcatccatctgtaccgcagcaaccagcgtcgggtaggtcggcagaatgaacagaccagacaccgcagcgaaagaagcaacagcggtcagcggactaacgttcagtgccagagccatcggcatcagtgcttttgcggttgcagcctgagagtacagcagagcagaagcaaagaagaagatgacggccagcagccacggatgaccctgaatcacttcaccagcggtatctttgatccagtcgatgttgttggaaacgaaagtatcgcccagccacgcaacacccaggatacaaatacaggcgctcatacctgctttgaaggtgctggagttgaggatgttgtcggtatcgactttacagataacggtggtcagagttgcaacgctgagcatgatgatcaggattgcgttggtggtgttcatcagcggtttttcaaccagacccatgcttgggctgttgatgattgcatagataaccacgccaactacgcccagcaggaacagccagacggacgtttttgcaccggatttgatttcaatctgcttttcaccgcgcagttcaaccaggccctcttccagacgcttgcgataaatcggatcgtcagagagtttggagttgaacagcatagtgaccaggaaggacatcaccagaaccgccagcagggtggacgggatgaccacggagagcagatggaggtagctgatgccatgaccttccatcacggaagacatgtaaaccactgccgcactgattgggcttgcggtgatcgcaatctgcgcggataccactgcagtagacagcggacggcaaggtttaacgccttgttccttcgcaacttcagcgataactggcagtgtcgccagagagatgttgccagtaccagcaaagatagtcaggaaataggtcacgatcggtgcgaggatcgtgatgtatttcgggttacggcgcagcagcttttctgtctgatgaaccagatagtccagaccgccagcaacctgcatggcagaaatagcggcgataaccgccatgataatggagatgacatcgaacgggatgttaccgggtttaacgccaatagcggcaagaaccagcacccccaatccgcctgcaaaaccaatacctattccccccaatctggcgcccaagaagatcgccagcaaaactatgatgagttctacaactagcatattagccttccttgttttttaacaagttgatattagattgttatttttaagttactgctcacaagaaaaaaggcacgtcatctgacgtgccttttttatttgtactaccctgtacgattactgttcgctttcatcagtatagcgttttgctttgtaagccgggtgcatcagattctgtacggagaaaatatcgtcaagttccgcttcagtcaacagaccgcgttccagaacgacttcacgtacactcttaccggtttcggcacagattttacccacgatgtcaccgttgtggtgaccgatgaacgggttcaggtaagtaacgataccgatagagttgtaaacgtaaccttcgcacacttctttgttagcagtgatgccgttaatgcatttttccagcaggttgtagcaagcgttggtcagaatgtgaacggattcgaacatggcctggccaatgaccggctccataacgttcaactgcagctgacctgcttctgctgccatggtaacagtggtgtcgttaccgatgactttgaagcatacctggttaaccacttccggaacaaccgggtttactttagctggcatgatggaagagcccgcctgcagttccggcaggttgatctcgttcaggccggcacgtgggccactagagagcaagcgcaggtcgttacagattttggacatcttcacagccaggcgtttcagcgcgccgtgaaccataacataagcgccgcagtcagaggtcgcttcgatcaggtcttcagccggtacgcatgggaagccagtaacttcagccagttttttcactgccagcggagagtactctttcggcgtgttcagaccagtaccgattgctgttgcaccaaggttaacttccagcagcagttcagcggtacgttggatgtttttcacttcttctttcagcaggatgctgaaagcgcggaattcctgaccgagggtcatcggtactgcgtcctgcagctgggtacgacccattttcaggatgtcctggaattcgacagctttacgttcaaagccttcacgcagttggttaatcgcatctaccagcttaatcagggaagagtaaactgcgatacggaaaccggtcgggtaggcgtcgttagtggactgacatttgttaacatggtcgttcgggttcaggtactgatattcacctttttggtgacccatcagttccagaccgatattggccagcacttcgttggtgttcatgtttacggaagtacctgcgccgccctggtagacgtctaccgggaactgatccatgcattttccgttgttcaggacttcatcacatgcggcaatggtggcattcgctacacttttaggaatggtttgcagctctttgtttgccatagctgcggcttttttaaccattaccataccgcgaacaaattcaggaatatcactgattttgttgttgctgatatagaagttttcaatcgctctcagagtgtgaacaccatagtaggcatcagctggaacttccctggtacccaacagatcttcttcgatacgaatgttgttactcatgtgaaccttctttttcaagctgccaatgatttgctttaaacacacagaatatatgtggtttcgaatgtttttcgaccgacgattatcccctgcatcgaccgaatacccgagatcatatgctgcttgaggatttctaccgtaatctggatcactttaagtgtcggtttttaccccttaattattaatttgtgaaatagatcaccgctttgggattactaccaaaaatagttgcgcaaacatcttgaaattttgctaatgaccacaatataagctaaacgcgattcgcaacccattcaggtagccggggttaaccggctgctattacaggagaaacctttgcgctggttaccttttattgccattttcctttatgtctatattgagattagtatctttattcaggttgcccatgtattgggggtattgctgaccctcgtgctggttatattcacgagtgttatcggtatgagtctggtacgtaaccagggctttaagaatttcgtgctgatgcagcaaaaaatggcggcgggtgaaaacccagcggcggagatgattaaaagtgttagcctgatcattgctggtttgctgcttttattaccgggcttttttaccgacttcctcggtcttctacttttattgccgccggtgcaaaagcatctgacagtgaagttgatgccgcatttgcgcttttctcgcatgcctggcggcggttttagcgccgggaccggtggcggtaatacttttgatggtgagtaccagcgaaaggatgatgagcgcgaccgccttgatcataaagacgatcgccaggattaatgtcgaaacgccggattatgtggttatgccattttccggcgtttttcgttttggcagcaacagccataaccccgccagcatgatcagcgcatagagacttttccagccgaccattgccagtaacagaacgcataacagcccgccaaccaccgccagtagtcgataacgtccttgcaataatttacagcctgccagcatgcataacagataaatcataataaagatgccattggcataaataataagagcgtccagattgatctctaaagcatgaatcaccaaagtgctcaccacacagcagccgagcaccgcattgagggcattattcgggatatggcgagaagagaggcgtgccaggtagtggtcaggattatgttgcgcctggctccagaccaggcgggcgaagctctgtatataaatgttgagactggcaaagcaggccagatagccaatcacgcaggcaatccataacgctcctacaccgaacaactgcactacaatttttggaaggcttgctgccgccgccattttttcaccataggcgtcgaagtgtaagacgactaccgtacagccccagtagactaatcctgccagcagcagaccaatcatcaaagcacgaggaaaatcacgctctggatttttaaattcgctggcgagatgggcaaatgcctccagaccgacaaaacaccagaacatcacacttaacgcagcaaataacccggtaagttcgatattaccaggtgccggaaaggggatattcgcaggtttgatatcgcccgcccaccagatagcgacaatcagcgcgacgataagtccggcaataacggtttgtagattagcactggaactggcaccgcgagtaccgatataccacaccagcgccagcgtaccgagttctgccaacaacagttgccagctatgccagccaaacatcgcctggccgaacccggcggcaatttgtagtgcggcaggcaaacccacgggaatgacgcttaaaaacagccagccggtgactcgctcaagccggctaccaaacgccataccgacgaagtgcgcgacgccgcctgcgctgggatagtggcgacccagaatcgcaaacacaatcgcaatcgggaacactaagataatcaaaacgggccacgcccacaggctgttattgcccgctaccagcgcagctaacgcaggaacggcaaacacgccagtgcctaataaactcgtgcttagcaggccaatgccctgggccagccccagttcttgtttgagtccactcatgggttgatgtccgattgcgcccaaattttgggcaactgcgtagattttcgatggtagcacaatcagattcgcttatgacggcgatgaagaaattgcgatgaaatgtgaggtgaatcagggttttcacccgattttgtgctgatcagaattttttttctttttcccccttgaaggggcgaagcctcatccccatttctctggtcaccagccgggaaaccacgtaagctccggcgtcacccataacagatacggactttctcaaaggagagttatcaatgaatattcgtccattgcatgatcgcgtgatcgtcaagcgtaaagaagttgaaactaaatctgctggcggcatcgttctgaccggctctgcagcggctaaatccacccgcggcgaagtgctggctgtcggcaatggccgtatccttgaaaatggcgaagtgaagccgctggatgtgaaagttggcgacatcgttattttcaacgatggctacggtgtgaaatctgagaagatcgacaatgaagaagtgttgatcatgtccgaaagcgacattctggcaattgttgaagcgtaatccgcgcacgacactgaacatacgaatttaaggaataaagataatggcagctaaagacgtaaaattcggtaacgacgctcgtgtgaaaatgctgcgcggcgtaaacgtactggcagatgcagtgaaagttaccctcggtccaaaaggccgtaacgtagttctggataaatctttcggtgcaccgaccatcaccaaagatggtgtttccgttgctcgtgaaatcgaactggaagacaagttcgaaaatatgggtgcgcagatggtgaaagaagttgcctctaaagcaaacgacgctgcaggcgacggtaccaccactgcaaccgtactggctcaggctatcatcactgaaggtctgaaagctgttgctgcgggcatgaacccgatggacctgaaacgtggtatcgacaaagcggttaccgctgcagttgaagaactgaaagcgctgtccgtaccatgctctgactctaaagcgattgctcaggttggtaccatctccgctaactccgacgaaaccgtaggtaaactgatcgctgaagcgatggacaaagtcggtaaagaaggcgttatcaccgttgaagacggtaccggtctgcaggacgaactggacgtggttgaaggtatgcagttcgaccgtggctacctgtctccttacttcatcaacaagccggaaactggcgcagtagaactggaaagcccgttcatcctgctggctgacaagaaaatctccaacatccgcgaaatgctgccggttctggaagctgttgccaaagcaggcaaaccgctgctgatcatcgctgaagatgtagaaggcgaagcgctggcaactctggttgttaacaccatgcgtggcatcgtgaaagtcgctgcggttaaagcaccgggcttcggcgatcgtcgtaaagctatgctgcaggatatcgcaaccctgactggcggtaccgtgatctctgaagagatcggtatggagctggaaaaagcaaccctggaagacctgggtcaggctaaacgtgttgtgatcaacaaagacaccaccactatcatcgatggcgtgggtgaagaagctgcaatccagggccgtgttgctcagatccgtcagcagattgaagaagcaacttctgactacgaccgtgaaaaactgcaggaacgcgtagcgaaactggcaggcggcgttgcagttatcaaagtgggtgctgctaccgaagttgaaatgaaagagaaaaaagcacgcgttgaagatgccctgcacgcgacccgtgctgcggtagaagaaggcgtggttgctggtggtggtgttgcgctgatccgcgtagcgtctaaactggctgacctgcgtggtcagaacgaagaccagaacgtgggtatcaaagttgcactgcgtgcaatggaagctccgctgcgtcagatcgtattgaactgcggcgaagaaccgtctgttgttgctaacaccgttaaaggcggcgacggcaactacggttacaacgcagcaaccgaagaatacggcaacatgatcgacatgggtatcctggatccaaccaaagtaactcgttctgctctgcagtacgcagcttctgtggctggcctgatgatcaccaccgaatgcatggttaccgacctgccgaaaaacgatgcagctgacttaggcgctgctggcggtatgggcggcatgggtggcatgggcggcatgatgtaattgccctgcacctcgcagaaataaacaaacccccgggcagaaatgtctgggggtttttcttttggtcatctttctagtataagattcagacacggacgacgcgagtggcgtccagctcattgattatggggaataacatgcacgtaaaatacttagcagggattgtcggtgccgcgctactgatggcgggttgtagctccagcaacgaattgagtgctgccggtcagagtgtacgcattgtggacgagcagccaggcgcagagtgccagctgattggtactgcgacaggtaagcaaagcaactggctttccgggcaacacggagaagaaggcggttctatgcgcggcgcagcaaacgatctgcgcaaccaggcggctgcaatgggcggtaacgtgatttatggcatcagtagcccgagccagggaatgttgtccagttttgtcccgacggatagccagattatcggtcaggtttataagtgcccgaactgatgtgatccagaggctgggtgacaaacgtataattgcctgatgcgcttcgcttatcaggcctacataaggcattgcaactgattgaatgcttgagaatttgtaggccggataaggcgtttacgccgcatccggcatgaccaacgatcacgttatcagtcatttcaggctggatggctccagcctcgcattagcaaagatgagattatttcgcctgtggtgcagttttgctggtggattgaacacgtaagtgatgcagcgcgcgtaagcattgatcctgggttagcggttgggcgttattcgccgctacggtgcgaacatagacctgacatggcacacccgcgagttttttcagtcgtgggctgaaatcaagcattcggcgagtgatcgcttctatttctttacccggcgttgcttcacgcgttttcaccactgcgccgctaaattgttctttgccactttcatctttaaagcggtaaagcaccgccagataatggtcgaacaagttatgtttccattccggttgggaataggtgtcatattccagattgccattgtcctggcagtcaacgtcgtataacggcaggaaatctaacagactggtaatacgtaatgccagttcacgcatttccgcattattaattgcatgaatgattgctcgcgccagcatttcaatctgcaactcattgacgactaactcacatttgctaccgtcatgtagcgttaatacgaaggtaagattttcgccttgattatcggtaagttccagcgtgttaacccgacgattaatatcggcatttttaagctcatcaaccagaatttctgggatgttttctgccattttcttaatgactttatcgcgagcttgctcatactgaaggtgtgcagcagcatccagtttatgcttttgatgcagacgactttccagcgcaatcagcaggtcgcgcagttccatgacagacataaagaacaagctttctttattgcgaggttctttaattttcagcgccagtgcaatgaaattattactcttgcgaataacaccggtattaacacccttgatgcttatggccatgtaggttctccctaaccatttctcaattaaataattaattttaatttataagccagataaatgggcttggtagtaatagttgttaaaataacataaatagccgtactcactctatataaacagaaaagaaaggttaattattggtgttagctatataaaaagtaacaacagcaatgcatatgaataattaaaggttatgcaacgggcaaagattaaacttcccagtttaatgacaggttgctgtacttgcgtttgttgctcttgccggatgcagcgtaaacgccttatccggcctacagttcattgcaaatccattcaatttcaatgcacgatgtaggcctgataagcgtagcgaatcaggcaattttaatgtttaacttccctgtttaatcagttactgctggcgtagctggagatccagcggcgttttgctgggttcgccgccaatttctcgcgccagtttcggcaccagatatccgctcaccagtgtcagcaactcacgcataatctgccgtgcttcgtcatcactcaccataaaatgcgccgcgccctgtactttatcgagcacatgcaggtaatacggcattacgccggcatcgaacaacgcattactcaggtttgccagcgtttgtgcgttatcgttcacatcacgtaacagaacgctctggttcagcaaagtaacgcctacccggcgcaacttagccatcgcctgacggaatgtttcatctacctcattggcatggttgatgtgattcaccagcaagatttgcagcgtagaacgggcaaagcattcaaccagcgcctcggtgatacgtgccgggatcacaatcggcagacggctgtgaatccgcagacgttttatatgcgggatggcttccagttgtgtgagcaaccagtccagctcgtgatctttcgccatcagcggatcgccgccggagaaaatcatctcgtccagttccggatgcgcagcaacatactcaagtgcagtttgccagttacgcttgttgccctgattttcggcataggggaagtgacgacggaagcaatagcggcaatttaccgcgcagccgcctttgaccagcaaaagcgcccggttgtggtatttatgcaacaaaccaggcactacgctgtgctgttcttccagtgggtcggtggagaatccgggcgcgatgacaaactcatcttggctggtaagtacctgacgcaaaagaggatcgtccggattgcctttctccatgcgatcgataaaactgcggggcacacgcagggcaaaaagctttttggcgctgcgtccggctaacagtttttcctccgcgtctatattcaaaagacgcagaagttcatcaggatcggtcacaacatcggcaagttgcgttaaccaatcttctctggatggggtatttagggttacaatatgcgccattttgtggcttagctaccaattaacaaatttcagagggccttatggcaacgtactatagcaacgattttcgtgctggtcttaaaatcatgttagacggcgaaccttacgcggttgaagcgagtgaattcgtaaaaccgggtaaaggccaggcatttgctcgcgttaaactgcgtcgtctgctgaccggtactcgcgtagaaaaaaccttcaaatctactgattccgctgaaggcgctgatgttgtcgatatgaacctgacttacctgtacaacgacggtgagttctggcacttcatgaacaacgaaactttcgagcagctgtctgctgatgcaaaagcaattggtgacaacgctaaatggctgctggatcaggcagagtgtatcgtaactctgtggaatggtcagccgatctccgttactccgccgaacttcgttgaactggaaatcgttgataccgatccgggcctgaaaggtgataccgcaggtactggtggcaaaccggctaccctgtctactggcgctgtggttaaagttccgctgtttgtacaaatcggcgaagtcatcaaagtggatacccgctctggtgaatacgtctctcgcgtgaagtaatgcggttgtggtgcggcctgcaggctgcaccatcacttattcaggtcagagatgatgaaacgccttatcgttcttgttttgcttgccagcacgctgctcacgggctgtaacaccgctcgcggtttcggcgaagacatcaaacatctcggcaactccatctctcgcgctgccagctaatttttcttctcttccgaaaaatcatcagattcccatcatttttggcgatgttgtctattattaatttgctataggcaaacataaataacattacctaaaaggaagacgttatggtgaagaagacaattgcagcgatcttttctgttctggtgcttagtacagtattaactgcctgcaacaccacgcgtggcgttggtgaagacatttctgatggcggtaacgcgatttctggcgcagcaacgaaagcgcagcaataagcaataacggtacgacagctgtgtcgtgccgtttgttttttctgcgatagtcacaaaggtaatagttgaaattcccctgccacctggcaaaatatccgttcaaccatcagctttgcaggacgacctgcaaacgcctcttttcaccggggacggccccaattctccggagcctgatatgtcctggattatcttagttattgctggtctgctggaagtggtatgggccgttggcctgaaatatacccacggctttagtcgtttgacgccgagtgttattactgtgacggcgatgattgtcagtatggcgctacttgcctgggcgatgaaaagcttaccagtagggacggcttatgccgtgtggacgggtattggcgcagtcggcgcggccataaccggcattgtgctgctcggtgagtccgctaacccgatgcgcctggcgagtctggcgttaatcgtattggggattattggtctgaaactcagcactcattaactaccaggctgctgtacccaaataaatttactgacatcaaacccttcccgggtcgcgactgccagcatctcctgtttcacttcgtcagaaatggttggcgtgcgggagagtatccacaggtagtcgcggtccgggccgcaaaccagcgcatggcggtattcccgatcgagtgcaataacgttataaccgccatagaaaggaccaaagaaactcactttcagcgcagcgcgagttggtgcgccggtaaagtacgctttcccttcactctgctgccacattcctctgtcagggttatagcctttattaatgacattcaggccgccgtcatcacgcaggctgtatgttgcggtgactttttccagtccacgttcaaagcggtgatcaaaacgggcaatctcataccaggtaccgagataacgtttggcgtcgaaattatttactacggtcacgccacgcggcggcgtaggagaactgcaggcaacgaccagaaatgcagctgtcgctgcggcaacgagagggagcaggcgcataaatgtttccttactggtttttttctaagtgtagatgacagcaaggaaaagcggagaaaaggtccgaaaattcggacccgatggaattttactgtagagcgttaagaatctgccaggcggcgtcgactctcgctggattgggatagtttttgtttgccagcatcacgatacccagctctttttctggaataaacgcgacatagctaccaaatccgccggtcgcccctgttttatgtacccaacttgcgcgtactgcaggagttgggggcgtaatcgcttttacggggcgtgctgccagtgcaattttattgtcactgccgttaatgatgctgtcaggatttaccggccagtccagcatttcccagcccaggccctgatacatatcgccggtttgccagtagcgagattgtgccagttgtatcccttgttgaagcgttttctcattgatatcaaggggttttaaattgctttgcacccagcgggccatatcttcaatggtgctcttcacaccataagcttcagcatctaacgccccagggctaacatgcactgccttaccttcgcgatatccccaggcgtaattcttttcttctgcgggcggtacattaatccacgtatggttgagtttgagtggctggaagacacgagtttgcatcgcctgctcaaaactcaaaccagacggcttcacagccagtgcgccgaacaaaccgatactggagttggcatacagacgttgtgttcctggagcccatgcaggctgccagttttgatagaagcgcagcaagtcgctactggatttcacctcatccggcacctgcaatggcaggccgccagcagtgtaggttgcgagatgtaatagtgtgatcccattccactgtttagcggtaagttcaggccagtattttgttgtgggatcgcttaacttgatttcccctcgagcaatagcgtcgccaccaagcacgccagtaaatgttttgctgacgctacctaactcaaacaacgtttgctgtgtgacgggctgctttttggcgatgtccgcatagccccaggtaaagtaataaggtttaccctgataaattaccgccaccgccatacccgggatcttttgttgctctataagcggggtaattgtgcgatgcacaatatcgttgatttgttgaggggcagcaaatgtggagcaagaggcggtaattaataaggcgcagagcgtcgttttgaacatagggtctggtttccatacaaaacggcccgccataggcgggccggatttacattggcgatgcgttagattgtaacgacaccaatcagcgtgacaactgtcaggatagcagccagaccgtagaaaacccatttgcccgcaggtacgtggattttcagatcgtgcatcgcgtggtgcatacggtgtaaaccacaccacagcggcagaacgatcatcaggaacaggaatacgcgaccaatgaagctctgcgcgaacgccagaacgcgctcgtagctcagcgcatcacccggaaacaaccccagtggcagcagaatacccaccagcaggatcatcaccggcgcaatgatggcgctccacataccaccggccccgaagaggccccagaataccggttcgtcagaacgctttggatttggattaatcatctcaggctccttaccagtacagggcaacaaacaggattacgatggtggcaaccacagttaccgcccagagacttttgataattggctctggtcccattttttcgtcttttacaatgatattggccgctttcggtgccagttcaaaccaggttttggtgtgcagcagagctgccgccagagtgatcaggttaatgatcacgataaccgggttttgtaaaaagtcgacgaatcccgcccaggcttccgggccatttttcagggcaaacagcccgaaaatcagttcaatgctgaaccacacagccggaaccgccgtgccttcgcgcagcatgtaaaagcgataaaacggcaattttttccaccaggtggacgtcattggccgtacatacggtttacgtttagtcgtcatgttgcactccttagcgtggtttcagggtcgcgataagaaagtctttgctactttctactttgccctgctgaatggccgcagccggatcgacgtgtttcgggcagacttcggagcagtagcccacgaaagtacagctccatacgccgttctggctgttcaactgcgccatacgctccttcttaccgtggtcgcggctatcttcgttataacgatgcgccagcgtaatggcagccggaccgatgaactctgggttcaggccaaactgcgggcacgcggcgtagcacaaaccacagttgatgcaaccggagaactggtgatacttcgccatctgcgccggggtctggatgttagtaccctgatccgcggtgcgggagttgccgatgatgtacggtttgatcgcttccagactttcgatgaagtgggtcatatcgaccaccagatcgcgttcaatcgggaagttagctaacgcttcaaccttcataccgtcggtgtaatcacgcaggaaggttttacatgccagttttggcacgttgttaaccatcatgccgcaggaaccacaaatcgccatacggcaggaccagcggtagctcaggtccggtgccaggttgtctttgatgtagcccagcgcatccagtaaactggtagttgcgtcataaggcacttcatagaatgcgctatgcggtgcggtatcgacttccgggttatagcgcaccacctcaattttcaggtttttcatctcagccattcgccttctccttcttattggctgcttccgccttatcggctgcatccgcttcgccaccgtaaacgcgtttagctggcggcagcgtagtaatcttcacgtcgctgtactccaggcgagtcgtgccatcagcatcgcggaaggcgagggtgtgtttgaggaagttgacgtcgtcacgctcggtgcaaccttcgtccagacgctggtgcgcgccgcgggactctttacgtgccattgcggagtgcgccatacattcagcaacgttcagaccgtggcccagttcaatggtgtagagcaggtcggtgttgaacacgctggaagtgtcggtgatgcgcacgcgcttgaagcgttcctgcagctctgccagcttgtcgatggttttctgcatcagttccggcgtacggtagataccgcagccttcttccatagccaggcccatttcgtcgcggatcttcgcccagttttcgccgccatcctggttaaccagatctttcagacgttgttcaacgccagctgcctgcgcttcaattgccgcttcgttgccattaccggcagttgctgcacgctctgtcgcttgttcaccggccagacggccgaagaccaccagttccgccagggagttagaacccagacggtttgcaccgtgcagaccaacagaggaacattcacccacggcgaacagacctttaatgcgggtttcacagttctgatcggtttcgataccgcccatggtgtagtgtgcggtcggacgtaccggaatcggttctttaaccggatcgacgccaacgtacgctttcgccagttcgcagatgaacggcagacgttcatgcagttttttctcgccgaggtgacgcaagtcgagataaaccacatcgccacgcggcgtggagatggtgttgcctttacgccattcgtgccagaaggcctgagagactttgtcgcgtggacccagttccatatatttgtttttcggctcgcccagcggagtttccgggcccatgccgtaatcttgcagataacggtagccatttttgttgaccagaataccgccttcaccgcggcaaccttcggtcatcaggataccggaacctggcagaccggttgggtgatactgaacgaattccatgtcacgcagcggaacgccgtggcttagcgccatacccataccgtcaccggtaacgatgccgccgttggtgttgtaacgataaacgcgacccgcaccgccagtagccataacgaccgcgttagcacggatctgcaccagcgtgccttccatcatgttcattgctaccaggccgcgaacatgaccatcatcaaccagaatatccagcacgaaatgttcgtcaaaacgctggatctgcgggaattgcagagaggtctggaacagcgtgtgcagcatatggaagccggtcttatcggcggcgaaccaggtgcgctcgattttcatgccgccgaagcgacgtacgttgacgctaccatccgggcgacggctccatgggcatccccacagttccagttgggtcatttcggttgggcagtggtggacgaaataatccacgacatcctgctcacacaaccagtcgccacccgctactgtatcgtgaaagtgatattcgaagctgtcatgatcctgcgcgacagcggcggagcccccttctgcagcaacggtatggctacgcatcgggtatactttactgattagtgcgatttttgcattcggatttgcctgcgcggcagcaattgcagcacgtaatcccgcgccaccggcgcctacaatggcaagatcggcttgaaaggtttgcacgacattcctccagattgtttttatcccacagccacgtacttcagggtaagtacctgaaagttacggtctgcgaacgctattccactgctcctttataggtacaacagtatagtctgatggataagtctgaaatttgacgagatcgatttttttagtgcgcaagagggctaaattatcactgaagatgattaatttaattactaaaccatcagatcgtgctttttttagtcactgcccaccgctgtttgattcctgcgtaaaatttgtctcgccgtcgcgttgcgagtagacttcgtgcccttgtcaaaaactggagatttaactatgagcgaaacggcatcctggcagccgagcgcatccattcctaacttattaaaacgcgcggcgattatggcggagatccgtcgtttctttgccgatcgtggagtgctggaggtggagacgccttgtatgagccaggcgacggtaaccgatattcatttggtcccgtttgagacacgtttcgttggccccgggcatagccaggggatgaatctctggttaatgaccagcccggaataccatatgaaacgcctgctggttgccggttgtgggccggtattccagctgtgccgcagcttccgtaatgaagagatggggcgttatcacaaccctgagttcactatgctggagtggtatcgaccgcactatgatatgtaccggttgatgaacgaggtggacgatctcttacaacaggtgctggactgcccggcagcagaaagcctttcttatcaacaagctttcttgcgttatctggaaattgacccgctctctgccgacaaaacgcaactgcgggaagtcgcagcgaaactggatttgagcaatgttgctgataccgaagaagaccgcgacacgctgctacaattgctgtttacctttggcgtagagccaaatattggcaaagaaaaaccgacctttgtgtaccactttccagccagccaggcaagtctggcgcaaatcagtaccgaagatcatcgggtcgctgaacgctttgaggtttattataaaggtattgagctggcgaatggtttccatgaattgacggatgcccgtgagcagcaacaacgctttgaacaagataaccgtaagcgcgcggcgcgcggtttgccgcagcaccccattgaccagaatctgattgaagccttgaaagtcggtatgcctgactgttccggcgtggcattaggtgttgatcgtctggtgatgttggcgctgggcgcggagacactggctgaagtcatcgcctttagcgttgaccgggcataattctgaaaaattactgaattaacagcgaagaatggcgtgataagcgccattctgtagcatatgttttcatttttccgttaaaggccacaatttaagactggatatttgatatcatccaggtatcaattctgtattggtttttacgctgcctgctcaatgttgcgcagtgcagttcagtgggcacgtgttatacacgcgctgaaatgaaggatggtttcatgcctcacacgataaaaaagatgagtctgataggactcatattgatgatctttacttccgtatttggatttgccaatagcccaagcgcttattacttaatgggttatagtgcgattcccttttatatattttctgcattgttattctttattccattcgccttaatgatggctgaaatgggagctgcttatcgcaaagaagaaggcggtatctattcctggatgaataatagtgtcggaccacgttttgccttcattggtacgtttatgtggttttcctcttatatcatctggatggtgagtacctccgcgaaagtttgggtaccgttcagtacattcctctatggtagcgacatgacccagcactggcgtattgccggactggagcctacgcaggtggttggtctgctggctgtggcatggatgattctggtcaccgtcgttgcttctaaggggattaataaaattgcccgcattactgcggtgggcggtattgcagtaatgtgtctgaatttagtattgctgttagtaagcattactattttgttattaaatggtgggcatttcgcgcaggatattaatttccttgcaagtccgaacccgggttatcagtccggtctggcaatgctaagctttgtggtatttgccatttttgcctatggcggaattgaagcggttggtggtctggtcgataaaacggaaaatccagaaaagaactttgccaaaggtattgtttttgccgctattgttattagtatcggttatagcctggcaatatttttatggggcgtcagcacaaactggcagcaggtattaagtaatggttccgttaacctcggcaatattacctatgtgctgatgaagagccttgggatgacgctgggtaatacactgcatttgagtcctgaagcgagtttgagcctgggcgtatggtttgcgcgtattactggacttagcatgttcctcgcctataccggtgcgttctttacgctttgctatagtccgttgaaagccatcatccaggggacgccgaaagcattgtggccggaaccgatgacgcgcctgaatgcgatggggatgccgtctatcgccatgtggatgcagtgcgggttggttactgtcttcatcctgctggttagctttggtggcggtaccgcaagcgcgttctttaacaagctgacgctgatggcgaacgtgtctatgacgcttccttacctgttcctcgcgctggctttcccgttctttaaagcacgtcaggatctcgacagaccgtttgtgattttcaaaacgcatttgagcgcaatgattgcgacagtggttgtcgtactggtggtgacatttgcgaacgtcttcaccatcattcaacctgtggttgaagccggagactgggacagcacattgtggatgattggcggccctgtcttcttcagcctgttagcgatggcgatttaccagaactattgcagcagagtggcaaaaaatccgcagtgggcggtggaataacccgatgccctatcgtctacctgacgatagggcgtaaagacaggaaatgttatggatgacaccagccgggacccggcaataaccgaagatgaaatcagggcgctgcaattttctgccggggatgtagcggaaatagagcagacgattctctcttttgtcgatgcctgccacacccgtaaagtggcgatggtggtgggtagcaccattaacaccctcaaagatcgcgatggtaaacggtggggaaacctgccggatatttattgcgcttatcttatccgatgtctggtttttcgcggggaattagtgggatacggcgatttgtttcgtatgcgctatagcgaaattaagcgaccggttaccttatgagtgcgcgcatgtttgtcttatgctgcatctggtttattgtggcgttcctctggataaccatcacttccgcgctggacaaagagtggatgattgatggacgcgggattaacaacgtctgcgatgtgttgatgtatctcgaagaagacgatacccgtgatgttggtgtgataatgacgttaccgctctttttcccttttctctggttcgctttgtggcgaaaaaaacgcggctggtttatgtacgccaccgcgctggctattttcggctactggctgtggcagttttttctgcgctatcagttttgtttgtgagccggattggttcatccggcacacaaacttacaaacttcccgcctgacgacctttgcccgcagacgtcagcgttctccccgtttgtttaccgttgaggctttccagacgcatctggaagggcgggaatggcatatcgataccgtgggcatggaagccagccagaatcagctggtggatctcatggcgtagcggcatacggtgacccatctcagcggcgtaaatacgcagctcgaaaatctgaatcccctgttgcagatccaccaggaagacttccggtgccgggttgtcgatcaccaggctgcagcgacgcgctgcggtgagcaggatttccgtcacttcttcgctattggcatcggcaggggccggtatcgtcaacaccacgcgcgtgacgctgtcagagaggctccagttgataaactgctcggtaataaacgccttgttcggcacgattatctctttacggtcccagtcgctgatggtggtggcgcgggtgttaattttcgtcacgctaccggtgagatcgcgaattgtcaccgtatcgccaatgcgaatcggtttttcgaacaggataatcagaccagagataaagttggcgaaaatttcctgcaaaccaaaaccgagaccaacaccgagcgcggcaaccagccactgcaatttgctccactcaataccaatcatactgaagccgaccagcccgccaatcagcatcagcagatatttggtgatggtggtgatggcgtaacccgtacccggcgttaaatccaggtgctgcaaaatcgccagttccagcagcgcgggcaagttgcgcaccagctgcgtggtgatgataaacaccagaatggcaatcagcaccgcaccgagggtaattggctccagactttctacgccctgtaccgtggaggtgacatcccacaggctaatattttcgaggaagccgaaagcggaatggatttcactccacagcacaatgacagaaagcagggcgatcaacatcaaaatactgcgcaccagccgcaaggattgcgcactgatggcatcgagatcgacttcgctttcatcgacttcaattgctccttccgggctactgtgatgatgcgcttcctcttcgccacgcgcacgttgcgctaacatctctgcccggcgatgcttcgcccgatcaaacgccagcctgcggcgctggatcagcatccagcggcggataacgtgataaaccaccagtagcaggaaccagatggcaacgctggtttcaagcctcgctaacagcgcctgtgccgttgccagataacccaccgcgctcgccagaatggcaaccaacggcgcgccaatcatcatgttccacagcatatggttggtaatgttgtcgccgctgccctctttgttgagatacagcggaatcccggcctttttcaggctgagggtgaccaccgccagcgcaccgcaaatgaggataaagcaaagccgtcccaggctaccggagaattcacggtcgtcgaggttatcgaacatcatcagcgccataatcagcggcacaataagcccgatgctcatcaggtagtagcgcatcccacgggaaacacgttcgcgcggccagccaaaatgagcgataaacaagccgttcgggcgggcaaaggtggcgcaaatcatcactacccacagcagcggcacggtggccgttacaccatcgccaatcgcgaccgccagcggataaggccacgcctcgcgcaagccgtaacccagcgtcatccacagcaccggtaacggactcgcgacgagaatgctccagaaaagagtgcgcaacgtcagccagaagtgatcctgagtcactttgccaactttcgccgcgctacgttcaagaaaacgggtgaaatagcggcggctgtaaatactgcaaccgaccagaatcaacgcgccaaacagcggcaaaattgtctctttgctggtcagcatcatcacactggctttgcccaactgactgaaggtgtccaggctaatgagacgacgcagatcctgggcgatttccagcggccaggcgatggtcatcgggcgcacgtcagaggtccagaacagatagcggtgcgttgcttcgttcacctctttcagcgcatcctccagttgcccgttggagactttcagcttggtcagttccaatagtagcgtgtcgccaccctgcaacaaactgttcagcaactcacgctgagtgcgcagttgtgcttccagaatacggttttgctcggcagtcagcggctgaccgtcggcctgatgaatttgccgtagcagcggctgtttattaagcagatcctcataacgtaaccgttgcacacgcaactgcgccatttcggtatcaagctgttgtggtttcggcatttccggcagccgtgccacctgcgcccgcagcgcttcgccgagcagattggagcttcccagccattggctctgttcacgcagcgtattcaacgcctgccggacctgtaacgtctggctggcagcctgacgctgttggctggcaacgagatccatccgctgcgcctgttgattcaaagccgcgcttagttcgcggttaattttgaattgcgcgacgatatctttcggcaaatcggcgctgttttctgccagcaattcggtactttccagcgcccgctccgcctcaagctgacgttggctgtttaattgattacgcaaggcctgcaaatacgcatccagttgctggctctctttttccgccagctcactgcgtaagcgcgctaattcctggcggttattggcagacagctgcgccagctccagttcatcaacgagcgccttaagacgtgcagagtcagactgcaacgcgaaattttgtgcctgattgagcggagtattgccggtaagcgttcccaggcggcgctcgatctcatttaactgacggcgggcgtcggtttgctgttgcggcagttgattcaggctatcggcaatctcgcgggcgcgctcctgctcttgctgggcctgacggcttttatccagcaactggctgctgacctggagaatttcctgattcagcgcgtcggtagacattcccgggctcacgctgcgcggctcgtcacgcatgttgtttaattgtgcgcgcagagtagcggagagtttcggataattatcgataacttgctgatattgtttgatgcgctcaagggaaccttttcgttcctcaagcgcatttaaggcagactggagcgcctctacgacttccggctgtgcgggtttcgccgcttttgcctgctccagttcctgagtgatttgtttgctatcgggggccgtcgcggcgtacgccccccaactgaggcaccaggccatcagaaaagtgataatcaggcgcacgtcagcgtttcctttgatggattagacctggtcttttttgtcgtcaaccaatgggctggcgtcgtgttctgcttcgatctcttcagcaggaagcggggcaggttcagcgtctggcgtaacaaaggtttcggtagatactgccagcggctggccaattttcgtgacagacaggctttccagttgctcaaccagattcactttacccggtgcaaacaggttgataacggtggaaccgagtttaaagcgacccatttcctggcctttcagcagtgccacagaaccgtcgttttccccggcaggccaggtccagcgcttgatgataccttcgcgcggcggcgtaatggtgcccgcccagaccgtctcaatgctgccaacaatcgtcgctccgaccagaatctgcgccattgggccaaattcggtatcgaaaaggcaaatcacgcgttcgttacgggcaaacagattcggcacgttctgagccgtgagatggttaacggagaagagatcgcccggcacgtagatcatctcacgcagaataccgttgcacggcatgtgtacgcggtggtagtcacgcggggagaggtaagtggtcacaaacgtaccgttgcggaacaggtccgccatcagatagttgcctgccagcagggcttcgaggctgtagttgtggcctttggcttgcaggattttatcttcttcgattttacccaactggctgataacgccatcggcaggcatgaccagtacattcggatcggtatcgattgggcgtacttcgtcacgcagcggacggacaaagaattcgttaaaggtgcggtagctggcggtgtccggcttttgcgcctctttcatgtcgaccttgtagtatttaacgaacagatcgataaccagttttgtcagccatcctgcccgcttgcttgcgccccaacccgccaggcgagtaagccatagtttcggcagaatgtactgtaggctaagtttaaaactatttaacaaggtagcctccaggccattgttttgtcgttcctgatccggcctacatgccggatcctgaaaaaaaggggacgattctaacgacggttagcttaattgtcagtcatccgtatcagaaaagtttttacgcgtttttacctgcgccatgctttccagaatacggtgatagttttcgaaacgggtttccgcgattttcccttcctcaaccgcttcccggatagcgcagcccggatcggtatcgtgtttgcaatcgcgatatttacacagacctaaatagtcatggaattcgacaaagccctgagtgatttgttccggctccaggtgccagaggccgaactcacgcactcctggggagtcaatcacatcaccgccgtgcgggaagtgatacagccgagcggcggtcgtggtgtgctgaccgagcccgctgttgtcagagatatcgttggtcaggatctctttttgcagccccagcaacgcattcagcaggctggatttgccgacgccagactgcccggcaaaaatgctgatgcgcccggtcaacgcctcttccagcggttttagcccatcctgagtatggctggaaaccatcaatacgcgataaccgatattgcggtagatatccatctgctcgttgacgaacgccatgccttcgtcgtccagcaggtctatcttgttgagcacaataatcggctcaatctgcaaggtttcgcaggccaccaggtaacggtcgataatattgaggctcagctccggcaaaatggcggagacaatgacaatctggtcgatgttggcggcaataggttttacgccgtcgtagaaatccggacgcgtcaacacgctggtacgctcatgcaccgcttccacgatccctttgacatttacgccttccgccgccggtttacccggacgccagactacgcggtcgccggttaccaggctacggatggtacggcgaatattgcagcggtgaacgtcgccatcggcggattccacatcagcgtgcataccaaagcggctgatgacgataccttcatcaggctcgccaaacagattgtcgtcgtagtcgggcttctccttagacgttttaagacgacgctggtgattggcgttcacgcggcgctgctggcctttggagagtttatttttactcaatcgtacagactcctggtcgcccctgatgggcaaaacatctatgatacacgcaattgtggatcaatatagtcactgtgaatgggtggaaaatagcatgagtgccaatgaaaacaacctgatttggatcgatcttgagatgaccggtctggatcccgagcgcgatcgcattattgagattgccacgctggtgaccgatgccaacctgaatattctggcagaagggccgaccattgcagtacaccagtctgatgaacagctggcgctgatggatgactggaacgtgcgcacccataccgccagcgggctggtagagcgcgtgaaagcgagcacgatgggcgatcgggaagctgaactggcaacgctcgaatttttaaaacagtgggtgcctgcgggaaaaagcccgatttgcggtaacagcatcggtcaggaccgtcgtttcctgtttaaatacatgccggagctggaagcctacttccactaccgttatctcgatgtcagcaccctgaaagagctggcgcgccgctggaagccggaaattctggatggttttaccaagcaggggacgcatcaggcgatggatgatatccgtgaaagcgtggcggagctggcttactaccgcgagcattttatcaagctgtaaaatttttcctggtcacgtaagcgccggaatccacttgcggcggcgtgattttgacgctaaattgaacgtcttgctgataatttcagcacttgagataaaaacgcaaaaaaaacttttttggggggttgcagagggaaagatttctcgtataatgcgcctcccgtaacgacgcagaaatgcgaaaattacgaaagcaaaattaagtagtacgcgggaatagctcagttggtagagcacgaccttgccaaggtcggggtcgcgagttcgagtctcgtttcccgctccaaaatttgaaaagtgctgcaaagcacagaccacccaagcgggaatagctcagttggtagagcacgaccttgccaaggtcggggtcgcgagttcgagtctcgtttcccgctccaaaatttgaaagtgctgtaaggcacagaccacccaagcgggaatagctcagttggtagagcacgaccttgccaaggtcggggtcgcgagttcgagtctcgtttcccgctccaaattcttctctcaataaaatatccacagcgacgcgatgcgttattgctggtttttgttgtctctgacaaactcttgtaaacagagttatccacagcctcaggctgtaatcttaatttcaaagaaacttcgcacggtgaatagtatttttttaacctattgatagataagttaaaaattaagattccgttttgtcgagtcgatcacttgacgattttattcgtcttgaattgcaatgcgtttttatttttattcacaagctgtggatgaatcaggcgtcacgcggtaaccctttttcaatcacccgaaccagacgctgttttttcggcaattgcacttcgactatgcacgcatttcgtctctctatttgctgcgcaatcgcccacgctatgtgctcatcgagaagtgggtgctcacctttacgactttccagcgctgtcaaaatcgtttcatcccaaggggcattgcctaatgctacggcgatattacgcagccaacgcaggtgaccaatacgacgaatcgcgcttccttccgtgacttttaaaaacttctcttcgctccaggcgaataactcaatgagttccggtgcgtgtagcggcttacgcgggctgaaatcctcttctgtggtgagttgactatagcgattccacgggcagataagctggcagtcatcgcaaccgtaaatacggtttcccattaacggtcgcaactcttccgggatcgccccttcaagttcgatggtgagataagagatacagcggcgagcatcgacggtatatggctcgacgatggcaccggtcgggcaaatcgtcatacaggccacgcatttgccgcatccttcctcgactggttgatccacgggcagcggaatatcgaccagcaattcgcctaaaaagaagaagctaccggcctcgcgattgaggataagactgtgcttacctgtccagccgagcccagctttttcagctaacgggcgctcgagaataggcgcagaatcgacaaacggtctaaaattcaggctaacacaatgttgctgaatcatctcgcccagctttttgagtcggttgcgcagaagtttgtgatagtcacggcccagcgcataacggctaacatagccgagtttggggtttttcagcgtgctggcaaatgcggcgttagcaggaaggtaattcatccgcacgctgatcacgcgcagcgtaccgggcaataactcatgagggcgagcgcgcagcataccgtgacgtgccatccagtccatttcgccgtggtattgtttgtccagccatgcttgcagtttgggctcggactcgctgagatcggtatcggtaatacctacctgctgaaagcccagttccagcccccactgtttaattttttgcgctaactgattgagatcgaggggctcactcatgacggaccatacaatgaagaaaaaccccgtaagtataccacacaccgtctggtacgccgacgatatccgccgcggagaacgcgaggcggcagatgtgctggggctcacactctatgagctgatgcttcgcgctggcgaggccgcattccaggtgtgtcgtagcgcgtatcctgacgcccgccactggctggtgctgtgcggtcatggtaataacggcggcgatggctacgtggtcgcgcgactggccaaagcggtcggcattgaggtcacgttgttggcccaggagagcgacaaaccgttgccggaagaggccgcgctggcacgcgaagcatggttaaacgcgggtggcgagatccatgctagcaatattgtctggcccgaaagcgtagatctgattgttgatgcgctgctcggtaccggtttgcggcaagcgccccgcgaatccattagccagttaatcgaccacgctaattcccatcctgcgccgattgtggcggttgatatcccttccggcctgctggctgaaactggcgctacgccaggcgcggtgatcaacgccgatcacaccatcacttttattgcgctgaaaccaggcttgctcactggaaaagcgcgggatgttaccggacaactgcattttgacagtctggggctggatagttggctggcaggtcaggagacgaaaattcagcggtttagtgcagaacaactttctcactggctaaaaccgcgtcgcccgactagccataaaggcgatcacgggcggctggtaattatcggtggcgatcacggcacggcgggggctattcgtatgacgggggaagcggcgctgcgtgctggtgctggtttagtccgagtactgacccgcagtgaaaacattgcgccgctgctgactgcacgaccggaattgatggtgcatgaactgacgatggactctcttaccgaaagcctggaatgggccgatgtggtggtgattggtcccggtctgggccagcaagagtgggggaaaaaagcactgcaaaaagttgagaattttcgcaaaccgatgttgtgggatgccgatgcattgaacctgctggcaatcaatcccgataagcgtcacaatcgcgtgatcacgccgcatcctggcgaggccgcacggttgttaggctgttccgtcgctgaaattgaaagtgaccgcttacattacgccaaacgtctggtacaacgttatggcggcgtagcggtgctgaaaggtgccggaaccgtggtcgccgcccatcctgacgctttaggcattattgatgccggaaatgcaggcatggcgagcggcggcatgggcgatgtgctctctggtattattggcgcattgcttgggcaaaaactgagcccgtatgatgcagcctgtgcaggctgtgtcgcgcacggtgcggcagctgacgtactggcggcgcgttttggaacgcgcgggatgctggcaaccgatctcttttccacgctacagcgtattgttaacccggaagtgactgataaaaaccatgatgaaagcagtaattccgctccctgaataaggaagtgactgataaaaaccatgatgaatcgagtaattccgctccctgatgagcaggcaacattagacctgggcgagcgggtagcgaaagcctgcgatggcgcaaccgtaatctatctgtatggcgatttaggcgcaggtaaaaccacctttagccggggctttttacaggctctgggtcatcagggtaatgtcaaaagccccacttatacgctggtcgaaccctatacgctcgacaacttaatggtctatcactttgatttgtaccgccttgccgatcccgaggagctggagtttatggggatccgcgattattttgccaacgatgccatctgcctggtggagtggccacaacaaggtacaggtgttcttcctgacccggatgtcgaaatacacattgattatcaggcacaaggccgtgaggcgcgcgtgagtgcggtttcctctgcgggtgaattgttgctggcgcgtttagccggttaacctttgaaaggtggcgggatgatgtatcgcatcagaaattggttggtagcgacgctgctgctgctgtgcacgccggtgggtgccgcgacgctctctgatattcaggtttctaacggtaatcaacaggcgcggataacgttgagttttattggcgatcctgattatgcgtttagccatcaaagcaaacgcaccgtggcgctcgatatcaaacaaacgggcgtgattcagggactgccgttgttgttcagcggcaataatctggtgaaggcgattcgctctggaacgcctaaagatgcacaaacgctacggctggtggtcgatcttaccgaaaacggtaaaaccgaagcggtgaagcggcagaatggcagcaattacactgtcgtctttacgattaacgccgatgtgccgccaccgcctcctccgccgcccgtggttgcgaaacgcgttgaaacgcctgcggttgtcgcaccgcgcgtcagcgaaccggcgcgcaatccgtttaaaacggaaagtaaccgcactacgggtgttatcagcagtaatacggtaacgcgtccggcagcgcgcgcgacggctaacactggcgataaaattatcatcgctattgatgccggacacggcggtcaggaccctggcgctatcggccccggtggtacgcgggagaaaaatgtcaccatcgccatcgcgcgtaaattgcgtactttgctcaatgacgatccgatgtttaaaggcgttttaacccgtgacggggattactttatcagcgtgatggggcgcagtgatgtggcacgtaagcaaaacgccaatttcctcgtgagcattcacgctgatgccgcaccgaaccgcagtgcgactggcgcttccgtatgggtgctctctaaccgtcgcgccaacagtgaaatggccagctggctggagcagcacgagaaacagagcgagctgctgggtggggcgggtgatgtgctggcgaacagtcagtctgacccctatttaagccaggcggtgctggatttacagttcggtcattcccagcgggtagggtatgatgtagcgaccagtatgatcagtcagttgcaacgcattggcgaaatacataaacgtcgaccagaacacgccagccttggcgttctgcgcagcccggatatcccaagtgtactggtcgaaaccggttttatcagcaacaacagcgaagaacgtttgctggcgagcgacgattaccaacaacagctggcagaagccatttacaaaggcctgcgcaattacttccttgcgcatccgatgcaatctgcgccgcagggtgcaacggcacaaactgccagtacggtgacgacgccagatcgcacgctgccaaactaaggacgattgatgccaattcaggtcttaccgccacaactggcgaaccagattgccgcaggtgaggtggtcgagcgacctgcgagcgtagtcaaagaactagtggaaaacagcctcgatgcaggtgcgacgcgtatcgatattgatatcgaacgcggtggggcgaaacttatccgcattcgtgataacggctgcggtatcaaaaaagatgagctggcgctggcgctggctcgtcatgccaccagtaaaatcgcctctctggacgatctcgaagccattatcagcctgggctttcgcggtgaggcgctggcgagtatcagtagcgtttcccgcctgacgctcactagtcgcaccgcagaacagcaggaagcctggcaggcctatgccgaagggcgcgatatgaacgtgacggtaaaaccggcggcgcatcctgtggggacgacgctggaggtgctggatctgttctacaacaccccggcgcggcgcaaattcctgcgcaccgagaaaaccgaatttaaccacattgatgagatcatccgccgcattgcgctggcgcgtttcgacgtcacgatcaacctgagccataacggtaaaattgtgcgtcagtaccgcgcagtgccggaaggcgggcaaaaagaacggcgcttaggcgcgatttgcggcaccgcttttcttgaacaagcgctggcgattgaatggcaacacggcgatctcacgctacgcggctgggtggccgatccaaatcacaccacgcccgcactggcagaaattcagtattgctacgtgaacggtcgcatgatgcgcgatcgcctgatcaatcacgcgatccgccaggcctgcgaagacaaactgggggccgatcagcaaccggcatttgtgttgtatctggagatcgacccacatcaggtggacgtcaacgtgcaccccgccaaacacgaagtgcgtttccatcagagccgtctggtgcatgattttatctatcagggcgtgctgagcgtgctacaacagcaactggaaacgccgctaccgctggacgatgaaccccaacctgcaccgcgttccattccggaaaaccgcgtggcggcggggcgcaatcactttgcagaaccggcagctcgtgagccggtagctccgcgctacactcctgcgccagcaagtggcagtcgtccggctgccccctggccgaatgcgcagccaggctaccagaaacagcaaggtgaagtgtatcgccagcttttgcaaacgcccgcgccgatgcaaaaattaaaagcgccggaaccgcaggaacctgcacttgcggcgaacagtcagagttttggtcgggtactgactatcgtccattccgactgtgcgttgctggagcgcgacggcaacattagtcttttatccttgccagtggcagaacgttggctgcgtcaggcacaattgacgccgggtgaagcgcccgtttgcgcccagccgctgctgattccgttgcggctaaaagtttctgccgaagaaaaaagcgcattagaaaaagcgcagtctgccctggcggaattgggtattgatttccagagtgatgcacagcatgtgaccatcagggcagtgcctttacccttacgccaacaaaatttacaaatcttgattcctgaactgataggctacctggcgaagcagtccgtattcgaacctggcaatattgcgcagtggattgcacgaaatctgatgagcgaacatgcgcagtggagtatggcacaggccataaccctgctggcggacgtggaacggttatgtccgcaacttgtgaaaacgccgccgggtggtctgttacaatctgttgatttacatccggcgataaaagccctgaaagatgagtgatatcagtaaggcgagcctgcctaaggcgatttttttgatggggccgacggcctccggtaaaacggcgttagccattgagctgcgtaaaattttaccagtagagttgataagcgttgattctgcccttatttacaaagggatggatatcgggacggcgaagccgaacgctgaagagttactcgccgcgccgcaccgattgctggatattcgcgatccgagccaggcttacagcgctgctgattttcgccgcgatgcgctggcggaaatggccgatatcaccgcggcggggcggatcccactgttagtgggcggtacgatgttgtatttcaaggcattgctggaagggttgagcccgctaccgagcgcagacccggaagtacgggccagaattgagcaacaggcggcagagcaaggttgggagagtttgcatcgtcaacttcaggaggtagatccggttgcggcagcaaggattcatccaaatgatccacaaaggctttcccgggcactggaagtttttttcattagcggtaaaactttaacggaactgacgcaaacgagtggagacgctctaccgtatcaggtgcatcagttcgccatcgccccggcgagccgtgaactgctccatcaacgcattgagcagcgttttcatcagatgttggctagtggttttgaagcagaagtccgggcgctttttgcccgaggagatttgcatacggacttgccttccattcgttgcgtgggttatcgccagatgtggtcttaccttgaaggcgaaatcagttacgatgaaatggtttatcgaggtgtttgcgccacgagacagttggcgaagcggcagataacctggctgcgtggttgggaaggggttcactggcttgacagtgaaaaaccagaacaggcgcgtgacgaagtattacaggttgttggtgctatcgcaggctgaatgtgtacaattgagacgtatcgtgcgcaattttttcagaatcgaaaggttcaaagtacaaataagcatataaggaaaagagagaatggctaaggggcaatctttacaagatccgttcctgaacgcactgcgtcgggaacgtgttccagtttctatttatttggtgaatggtattaagctgcaagggcaaatcgagtcttttgatcagttcgtgatcctgttgaaaaacacggtcagccagatggtttacaagcacgcgatttctactgttgtcccgtctcgcccggtttctcatcacagtaacaacgccggtggcggtaccagcagtaactaccatcatggtagcagcgcgcagaatacttccgcgcaacaggacagcgaagaaaccgaataaggtttcgggctgtttttttacacggggagccagcgatcctgcgttccccgctgatctatttagagggttatacgcttgtttgaccgttatgatgctggtgagcaggcggtactggtacacatctattttacgcaagacaaagatatggaagacctccaggagtttgaatctctggtctcttccgccggtgtcgaagcattgcaggtgattaccggtagccgtaaagcgccgcacccaaagtattttgtaggtgaaggtaaagcagttgaaattgcggaagctgtcaaagcgacgggtgctagcgtcgttctttttgaccatgccctgagcccggcgcaagagcgtaacctggagcgtttgtgcgagtgtcgtgttatcgaccgcaccggccttattttagatattttcgcccaacgtgcgcgtacccatgagggtaagttgcaggttgagctggcgcagctgcgccatctggctacgcgcctggtgcgtggctggacccaccttgaaagacagaaaggcgggataggtttgcgtggtccgggtgaaacccagctcgaaaccgaccgtcgtttgttgcgtaatcgcatcgtgcagatacagagccgcctggaaagagttgaaaagcagcgtgagcaggggcggcaaagccgtatcaaagccgacgttcctactgttagcctggtgggatataccaacgccggtaaatctacccttttcaatcgcatcaccgaagcgcgggtctacgcggcagaccagttgtttgccaccctcgacccgacgttgcggcgtattgacgttgcagatgtcggtgaaaccgtacttgcagataccgtagggtttattcgccacctgccgcacgatctggtggcggcatttaaagccacgttacaagagacgcggcaagccacattactgctgcacgtcattgatgcggcggatgtgcgtgtacaagaaaacatcgaagcggtgaatacggttcttgaagagatcgacgctcacgagatcccaaccctgctggtgatgaacaagatcgatatgctggaagatttcgaaccgcgtattgatcgggacgaagagaacaaaccgaaccgtgtctggctttccgcacagaccggagcggggataccacagctttttcaggctttgacggagcggctttccggcgaggtggcgcagcatacattgcgtctgccaccgcaggaagggcgtctgagaagtcgtttttatcagcttcaggcaatagaaaaagagtggatggaggaggacggcagcgtaagtctgcaagttcgtatgccgatcgttgactggcgtcgcctctgtaaacaagaaccggcgttgatcgattacctgatctaacggcgtagcgtctgaagcgtggagtcatatcctctggcgtcgaaagacaacagggatcaccgcataacaaatatggagcacaaacatggcgtggaatcagcccggtaataacggacaagaccgcgacccgtggggaagcagcaaacctggcggcaactctgagggaaatggaaacaaaggcggtcgcgatcaagggccacctgatttagatgatatcttccgcaaactgagcaaaaagctcggtggtctgggcggcggtaaaggcaccggatctggcggtggcagtagtagccaaggcccgcgcccgcagcttggcggtcgtgtcgttaccatcgcagcggcagcgattgtcattatctgggcggccagtggtttctataccattaaagaagccgaacgcggcgtggtaacacgctttggtaaattcagccatctggttgagccgggtctgaactggaaaccgacgtttatcgacgaagtcaaaccggtgaacgtggaagccgtgcgtgaactggccgcttctggtgtgatgctgacgagcgacgagaacgtagtgcgcgttgagatgaacgtgcagtaccgcgtcaccaatccggaaaaatatctgtatagcgtgaccagcccggatgacagcctgcgtcaggctaccgacagcgccctgcgtggagttatcggtaaatacaccatggaccgcattctgacggaaggtcgtaccgtgattcgtagcgatactcagcgcgaactggaagagacgattcgtccgtatgacatgggtatcacgctgctggacgtcaacttccaggctgctcgtccgccggaagaagtaaaagcggcgtttgacgatgcgattgccgcgcgtgaaaacgaacagcaatacattcgtgaagcagaagcgtataccaacgaagttcagccgcgtgcgaacggtcaggcgcaacgtatcctcgaagaggcgcgtgcgtacaaggcccagaccatcctggaagctcagggtgaagtggcgcgctttgctaaacttctgccggaatataaagccgcgccggaaattactcgcgagcgtctgtatatcgagacgatggaaaaagtgttgggtaacacccgcaaagtgctggttaacgataaaggtggcaacctgatggttctgccgttagaccagatgctgaaaggtggtaacgcccctgcggcgaagagcgataacggtgccagcaatctgctgcgtctgccgccagcctcttcctccacaaccagtggagcaagcaacacgagctccaccagtcagggcgatattatggaccaacgccgcgccaacgcgcagcgtaacgactaccagcgtcagggggaataacgatgcgtaagagtgttatcgcgattatcatcatcgtgctggtagtgctttacatgtctgtctttgtcgtcaaagaaggtgagcgcggtattacgctgcgttttggtaaggtactgcgtgacgatgacaacaaacctctggtttatgagccgggtctgcatttcaagataccgttcattgaaacggtgaaaatgctcgacgcacgtattcagaccatggacaaccaggccgaccgctttgtgaccaaagagaagaaagacctgatcgtcgactcttacatcaaatggcgcatcagcgatttcagccgttactacctggcaacgggtggtggcgacattagccaagcggaagtgctgttgaaacgtaagttctctgaccgtctgcgttctgaaattggtcgcctggacgtgaaagatatcgtcaccgattcccgtggtcgtctgaccctcgaagtacgtgacgcgctgaactccggttctgcgggtacagaagatgaagttactaccccggcggcagataacgccattgccgaagcggcagagcgcgtaacggctgagacgaagggcaaagttccggtcatcaacccgaacagtatggcggcgctgggtattgaagttgtcgatgtgcgtatcaagcagatcaacctgccgaccgaagtgtctgaagcgatctacaaccgtatgcgcgccgagcgtgaagcggtagcgcgtcgtcaccgtagtcaaggtcaggaagaagcggaaaaactgcgcgcgactgccgactatgaagtgaccagaacgctggcagaagctgagcgtcagggccgcatcatgcgtggtgaaggcgatgccgaagcagccaaactgtttgctgatgcattcagtaaagatccggacttctacgcattcatccgtagcctgcgtgcttatgagaacagcttctctggcaatcaggacgtgatggtcatgagcccggatagcgatttcttccgctacatgaagacgccgacttccgcaacgcgttaatataacgactgcggtacaggtcaataaagccaccgcatcctcagggatgtcggtggttttctttttctataaggataatgaatgaatagcacaatctggctggcgcttgccctggttttggtactggaaggtttagggccgatgctttacccgaaggcatggaagaagatgatctctgcgatgaccaatttgcccgataatattttacgtcgttttggcggtggacttgtggttgcgggcgttgtggtctactacatgttgaggaaaacgattggctgaacaaaaaacagactgatcgaggtcatttttgagtgcaaaaagtgctgtaactctgaaaaagcgatggtagaatccatttttaagcaaacggtgattttgaaaaatgggtaacaacgtcgtcgtactgggcacccaatggggtgacgaaggtaaaggtaagatcgtcgatcttctgactgaacgggctaaatatgttgtacgctaccagggcggtcacaacgcaggccatactctcgtaatcaacggtgaaaaaaccgttctccatcttattccaagtggtattctccgcgagaatgtaaccagcatcatcggtaacggtgttgtgctgtctccggccgcgctgatgaaagagatgaaagaactggaagaccgtggcatccccgttcgtgagcgtctgctgctgtctgaagcatgtccgctgatccttgattatcacgttgcgctggataacgcgcgtgagaaagcgcgtggcgcgaaagcgatcggcaccaccggtcgtggtatcgggcctgcttatgaagataaagtagcacgtcgcggtctgcgtgttggcgaccttttcgacaaagaaaccttcgctgaaaaactgaaagaagtgatggaatatcacaacttccagttggttaactactacaaagctgaagcggttgattaccagaaagttctggatgatacgatggctgttgccgacatcctgacttctatggtggttgacgtttctgacctgctcgaccaggcgcgtcagcgtggcgatttcgtcatgtttgaaggtgcgcagggtacgctgctggatatcgaccacggtacttatccgtacgtaacttcttccaacaccactgctggtggcgtggcgaccggttccggcctgggcccgcgttatgttgattacgttctgggtatcctcaaagcttactccactcgtgtaggtgcaggtccgttcccgaccgaactgtttgatgaaactggcgagttcctctgcaagcagggtaacgaattcggcgcaactacggggcgtcgtcgtcgtaccggctggctggacaccgttgccgttcgtcgtgcggtacagctgaactccctgtctggcttctgcctgactaaactggacgttctggatggcctgaaagaggttaaactctgcgtggcttaccgtatgccggatggtcgcgaagtgactaccactccgctggcagctgacgactggaaaggtgtagagccgatttacgaaaccatgccgggctggtctgaatccaccttcggcgtgaaagatcgtagcggcctgccgcaggcggcgctgaactatatcaagcgtattgaagagctgactggtgtgccgatcgatatcatctctaccggtccggatcgtactgaaaccatgattctgcgcgacccgttcgacgcgtaattctggtacgcctggcagatattttgcctgccgggcgaacagtgtgatacattgctgtgtcgggtaagccattacgctatccgacacagtgttaaatcctcgcttttttccttccccgaactgaaataaattagcgacacagcttgtggctggtttatcatcaatataaatgtattttttcccgatttcccttttgaggttgatgtgcagttaacgagtttcactgattacggattacgtgcgctgatctacatggcgagtttgccagaagggcggatgaccagtatttctgaagtgactgacgtctacggcgtctcccgtaatcatatggtcaaaataatcaatcaacttagtcgtgccggctacgtgactgctgttcgtggaaaaaatggcggcattcgcctgggtaaaccggcgagtgcgatacgtattggtgatgtggtgcgcgagctggagcccttaagcctggtgaattgcagcagtgagttttgccacattacacctgcctgtaggttgaaacaggcactttctaaggccgtgcaaagttttcttacggaactggataactacacgcttgccgatttggttgaagagaatcaaccgctttataaattattgctggtggagtgacgaaaatcttcatcagagatgacaacggaggaaccgagatgagtcaagatcctttccaggaacgcgaagctgaaaaatacgcgaatcccatccctagtcgggaatttatcctcgaacatttaaccaaacgtgaaaaaccggccagccgtgatgagctggcggtagaactgcacattgaaggcgaagagcagcttgaaggcctgcgtcgccgcctgcgcgcgatggagcgcgatggtcaactggtcttcactcgtcgtcagtgctatgcgctgccggaacgcctcgacctggtgaaaggtaccgttattggccaccgtgatggctacggctttctgcgggttgaagggcgtaaagatgatttgtatctctccagcgagcagatgaaaacctgcattcatggcgatcaggtgctggctcagccgctgggtgctgaccgtaaaggtcgtcgtgaagcgcgtattgtccgcgtactggtgccaaaaaccagccagattgttggtcgctactttaccgaagcgggcgtcggctttgtggttcctgacgacagccgtctgagcttcgatatcttaatcccgcccgatcagatcatgggcgcgcggatgggctttgtggtcgtagtcgaactgactcagcgtccgactcgccgcaccaaagcggtgggtaaaatcgtcgaagtgctgggcgacaatatgggcaccggcatggcggttgatatcgctctgcgtacccatgaaattccgtacatctggccgcaggctgttgagcaacaggttgccgggctgaaagaagaagtgccggaagaagcaaaagcgggccgtgttgatctgcgcgatttaccgctggtcaccattgatggcgaagacgcccgtgactttgacgatgcagtttactgcgagaaaaaacgcggcggcggctggcgtttatgggtcgcgattgccgacgtcagctactatgtgcgtccgagtacgccgctggacagagaagcgcgtaaccgtggcacgagcgtgtacttccctagccaggttatcccgatgctgccggaagtgctctctaacggcctgtgtagcctcaacccgcaggtagaccgcctgtgtatggtgtgcgagatgacggttagcagcaaaggccgcctgacgggctacaaattctacgaagcggtgatgagctctcacgcgcgtctgacctacaccaaagtctggcatattctgcagggcgatcaggatctgcgcgagcagtacgccccgctggttaagcatctcgaagagttgcataacctctataaagtgctggataaagcccgtgaagaacgcggtgggatcagttttgagagcgaagaagcgaagttcattttcaacgctgaacgccgtattgaacgtatcgaacagacccagcgtaacgacgcgcacaaattaattgaagagtgcatgattctggcgaatatcagcgcggcgcgtttcgttgagaaagcgaaagaaccggcactgttccgtattcacgacaagccgagcaccgaagcgattacctctttccgtagtgtgctggcggagctggggctggaactgccgggcggtaacaagccggaaccgcgtgactacgcggagctgctggagagcgttgccgatcgtcctgatgcagaaatgctgcaaaccatgctgctgcgcagcatgaaacaggcgatttacgatccagaaaaccgtggtcactttggcctggcattgcagtcctatgcgcactttactagcccgattcgtcgttatccagacctgacgctgcaccgcgccattaaatatctgctggcgaaagagcaggggcatcagggcaacaccactgaaaccggcggctaccattatagcatggaagagatgctgcaactgggtcagcactgtagcatggcggaacgtcgtgccgacgaagcaacgcgcgatgtggctgactggctgaagtgtgacttcatgctcgaccaggtaggtaacgtctttaaaggcgtaatttccagcgtcactggctttggcttcttcgtccgtctggacgacttgttcattgatggtctggtccatgtctctagcctggacaatgactactatcgctttgaccaggtagggcaacgcctgatgggggaatccagcggccagacttatcgcctgggcgatcgcgtggaagttcgcgtcgaagcggttaatatggacgagcgcaaaatcgactttagcctgatctccagcgaacgcgcaccgcgcaacgtcggtaaaacggcgcgcgagaaagcgaaaaaaggcgatgcaggtaaaaaaggcggcaagcgtcgtcaggtcggtaaaaaggtaaactttgagccagacagcgccttccgcggtgagaaaaaaacgaagccgaaagcggcgaagaaagacgcgagaaaagcgaaaaagccaagcgcgaaaacgcagaaaatagctgcagcgaccaaagcgaagcgtgcggcgaagaaaaaagtggcagagtgatcaataccctctttaaaagaagagggttagattgctgacaaaatgcgctttgttcatgccggatgcggcgtgaacgccttatccggcctacataatcacgcaaattcaatatattgcagagatcatgtaggccggataaacgtagtgcatcaggcaaaacgtaaacaacgagtacattaatgagcgaaatgatttacggcatccacgcagtgcaggccctgctggagcgcgcccctgaacgttttcaggaagtctttattttaaaaggccgtgaagataaacgtctgttaccgctgattcacgcccttgagtctcagggcgtggttatccagttggcaaaccgccaatatctcgacgagaaaagcgacggtgccgtgcatcagggcattatcgcccgcgtgaagccaggacgtcagtatcaggaaaacgatctgccggatctgatcgctagcctcgatcaaccgttcctgctgatcctcgacggcgtaaccgatccgcacaacctcggcgcgtgcctgcgtagtgcggacgccgcaggcgttcatgcggtgattgtgccgaaagatcgctccgcacagctcaacgctacggcgaaaaaagtagcctgcggcgcggcagaaagcgttccgctgattcgggtgactaaccttgcgcgcaccatgcgtatgttgcaggaagagaatatctggatcgtcggtacggcaggcgaggcggatcatacactctatcagagcaaaatgaccggacgcctggcgctggtgatgggtgcggaaggtgaaggtatgcgtcgcctgactcgtgaacattgcgatgagttgatcagcatcccgatggctggaagcgtttcttccctgaacgttagcgttgcgaccggaatttgcttatttgaagcggtgcgccagcgcagctaatttctcagaattatgaaaagccatccagatttggatggtttttttttgtctatagctggtaagataattacgtattgcaaatattcattttattaatatttaaacttaatctatatggaataatatatgacatggaatccgttggcgctagcgacggcgctgcaaactgtacctgaacaaaatattgatgtaacaaatagcgagaacgcattaattattaaaatgaatgattatggcgatttgcaaatcaatattctttttacttcccgccaaatgattatcgaaacctttatttgtccggtgagtagtatcagcaatccagatgaatttaataccttcttattaagaaatcagaagatgatgccgttgagtagcgtagggatctccagcgtacaacaggaagagtattacattgttttcggggcgttaagccttaaatcttctcttgaagatatcctgcttgagataaccagcctggtagataacgcattggatctggctgaaattacagaagaatatagtcactaattacaaggacgggtatttatgggaattttaaaaagtttatttacgctggggaaaagctttatctcccaggcggaagaatccattgaagaaacccagggcgtgcgcatgctggaacagcatattcgtgacgctaaagctgaactcgataaagccggaaaatctcgcgttgatctgctggcgcgggtgaaattaagtcacgataagctgaaagatttacgtgagcgcaaagccagtctggaagcccgtgcgctggaagcgttaagcaagaacgttaatccgagcttgattaacgaagttgctgaagaaatcgcgcgccttgagaatctcattaccgctgaagagcaagtgttgagcaatctggaagtctcccgtgatggcgtggaaaaagcagttacagcgacagcgcagcgtatcgctcagtttgagcagcaaatggaagtcgttaaagccactgaagccatgcagcgtgcacaacaggctgtaacaacctctaccgttggcgcatcttccagcgttagcacagcggcagaatccttaaaacgcctgcaaacgcgtcaggccgaacgtcaggctcgcctggatgctgccgcacagttggagaaagtcgcagacggtcgcgaccttgacgaaaagctggcggaagccggaattggcggtagcaataaaagtagcgcccaggatgtattagcaagactgcaacgccaacagggcgagtaatttttttgccagcctcgctaaaaggctggcaactattttaaggataaaatatgtctggttttttccagcgtctgtttggcaaggataataagccagctatcgctcgtggtccgctgggacttcatctcaatagtggctttacgctcgacacgttagcgtttcgtttgctggaagatgaattgctgattgcgctgccgggtgaggaatttacggtagccgccgtcagccacatcgatctgggcggcggtagtcagattttccgctactacactagtggcgatgagtttctgcaaatcaataccaccggcggcgaagatattgatgacattgatgatatcaagctctttgtctatgaagagagctacggtatcagtaaagagagtcactggcgcgaggcgatcaacgccaaagcgatgggagcaatgaccttaaactggcaggaaaaacgctggcagcgattttttaacagcgaagaaccgggaaatatcgaacccgtctacatgctggaaaaagtagaaaatcaaaaccatgccaaatgggaggtccataattttaccatgggctaccaacggcaagtaaccgaagatacttacgaatatttgctgctaaatggtgaggaatcttttaacgatctcggcgagccagagtggttatttagccgcgcgttgggtgtcgatatcccgctgacaagtcttcatattattggttaattacaaggacgtttacaatgcatatactggatagtcttcttgcctttagcgcctatttttttattggcgtggctatggtgattatttttctgtttatctattctaaaattacaccgcacaacgaatggcagttaatcaaaaacaataataccgcggcgagtctggcgttcagcggtacattgttgggttacgttatccccttatccagtgcggcaatcaatgcggtgagtattccagactatttcgcctggggcgggattgcactggtgattcagttactcgtttttgctggtgtcagactttatatgcccgcattaagcgaaaaaattattaatcacaataccgcagcaggaatgtttatgggaaccgccgcgctggctggcggtatttttaacgcagcttgtatgacatggtaatggacgatcatggccagaaaacgcaaaagtagaaataacagtaaaattggtcacggagcgattagtcgcattggtagaccgaataatccttttgaaccgtgccgcaatcgctacgcacaaaaatacttaacgttggcgctaatgggcggtgccgcttttttcgtattgaaaggttgtagcgatagtagcgatgtcgataacgacggcgacggaacgttttacgcgacagtgcaggattgtattgatgacggtaataatgccgacatttgcgcgcgtggctggaacaacgccaaaacggcattttatgccgatgttccgaagaatatgactcagcagaactgtcagtctaagtacgaaaattgctactacgacaatgttgaacagagttggatcccggtcgtttctggatttttgttaagccgggttattcgtaaagatcgcgatgagccgtttgtttataacagcggcggttcctcttttgctagccgcccagtctggcgcagcacttctggtgattactcctggcgctccggttctggcaaaaaagagtcttactctagcggcggctttaccaccaaaaaagcgtctaccgtttctcgcggcggctatggtcgttcttccagcgcccgtgggcattggggaggctaatcatgctgagacacaacgttcctgtgcgacgggatctggaccagatcgccgctgacaacggtttcgactttcatatcatcgacaatgaaatctattgggatgagagtcgggcttaccgttttactctgcgccagattgaagagcagatcgaaaaaccgactgcggaactgcatcagatgtgccttgaggtggtggatcgcgcggtaaaagatgaagagatcctgacgcaactggcgatcccgccgttgtactgggatgtgatcgctgaaagctggcgcgcccgcgatcctagcctgtatggacggatggattttgcctggtgtggcaatgcgccggtgaagctgctggagtacaacgccgatacgccaactagtttgtacgagagcgcttattcccagtggctgtggctggaggatgcccggcgcagcggcattattccgcgtgatgccgatcagtacaatgctattcaggaacgcctgattagtcgctttagcgagctttacagtcgggaaccgttttatttttgctgctgtcaggacaccgatgaagacaggagtaccgtgctgtacttgcaggactgcgcccagcaggcagggcaggagagccggtttatctacattgaagatctcggtttgggcgtcggcggcgtactgaccgatcttgatgataatgtcatccagcgtgcatttaagctgtatccgctggagtggatgatgcgtgacgataacggtccgctgctgcgcaagcgtcgcgagcaatgggtggagccgttatggaaaagtatcttgagtaataaagggctaatgccgctgctttggcgcttcttccctggtcatcctaatcttcttgcgtcctggttcgatggcgagaaaccgcagattgccgctggcgaaagctatgtgcgtaaaccaatctatagccgcgaaggcggcaacgtcaccatttttgacggcaagaataacgttgttgaccacgctgatggtgattacgccgatgaaccgatgatctaccaggcgtttcaacctctgccgcggtttggcgatagctacacactcatcggtagctggattgtcgatgatgaagcgtgcggaatggggatccgtgaagataacacactgatcaccaaagacaccagtcgtttcgttccgcattacattgctggataagaatgttttagcaatctctttctgtcatgaatccatggcagtgaccatactaatggtgactgccattgatggagggagacacagtgcactggcaaactcacaccgtttttaatcaacctataccattaaataacagcaacttatacctgtctgatggcgcgctctgcgaagcggtaacgcgtgaaggtgctggctgggatagcgattttctagccagtattggtcagcagttaggaacggctgaatcccttgaactggggcggctggcgaatgtgaatccgcctgaattattgcgctacgatgcgcaaggacgccgtctggacgatgtgcgttttcaccccgcctggcacctgctgatgcaggcgctatgtaccaatcgggtgcacaatcttgcctgggaagaagacgctcgctccggcgcatttgtggcgcgcgcggcgcgttttatgttacatgcgcaggttgaggcagggagcttatgtccgataaccatgacctttgccgccacgccattgttgttacagatgttacccgcgccgtttcaggactggaccacgccgctattgagcgatcgctacgattctcacttattgccaggtgggcaaaaacgcggtttgttgattggcatgggaatgacggaaaagcagggcggttccgatgttatgagcaacaccacccgtgcagagcgtctggaagatggctcttatcggctggtggggcataaatggtttttcagcgttccgcaaagcgatgcgcatctggtgctggcgcagaccgcgggtggtctgtcctgcttttttgtgccgcgctttttgcctgacgggcaacgcaacgcgattcgcctcgagcggctgaaagataagctgggtaatcgctctaacgccagttgcgaagtggagtttcaggatgccattggttggttgttggggctggaaggggaaggaattcgtctgatcctgaaaatgggtgggatgacgcgttttgattgcgccctgggtagccatgccatgatgcgccgtgcatttagcctggcgatttatcatgcacatcaacgccatgtttttggtaatccattgatccaacagccccttatgcgtcatgtcttaagtcgcatggcacttcagcttgaagggcaaacggcgttgctgtttcgtcttgcgcgagcgtgggaccggcgtgccgatgccaaagaagccctgtgggcgcgtttatttacgcctgcggcaaaatttgtgatctgcaaaagaggtatgccgtttgtggccgaagcgatggaggtgctgggcggcattggttattgcgaggagagtgagctgccgcggctttaccgggagatgccggtaaacagtatttgggaaggttccggcaatattatgtgcctggatgtgttgcgcgttctcaataagcaagcgggcgtatacgacttattgagcgaagcatttgtggaagtgaaagggcaggatcgctattttgatcgcgcggttcgtcgtttacagcagcagctgcgtaagccagctgaagaactggggcgagagattactcatcagctattcctgctgggctgcggtgcgcaaatgttgaaatatgcttctccgccaatggcgcaggcgtggtgtcaggtgatgttagatacgcgcggcggcgtacggttgagtgagcagatccagaatgatttattgctgcgggcgacggggggagtgtgtgtgtaagcgtatacgactgatgcgacgctggtttcgattaactaaatgaaatatgtgaaaattgtaggccggacaaggcgctcgcgccgcatccggcattgttcatttgctgtagatgacactcatgcatacagtatcgcctgtacgcgccagttatcaggctgctggtcttcgtacatggtaataatgcggtaccaactcgcaccttgttcatcggcctttaacgccacgatacgttccacgtcctgcggatccccactaatattgctaacactgatctgacctatttcattcaggcccgtcacgcagtcagcactggcgaattctgcagactgtgccgtggcgctcgcaggataagtcactaattgcaggctgggactggcaagtaattgtttcatcgtcagctccatttttcgtttccccacatgttgcagggcattccatcgcggtaataaacgcccaggcttccagccggtaatttattgtgcacaggtaaacgcatagggacgcaaagcaatgtaaagctgactatgtaagttgtctgatttatttacggtacaaaatggcttgactataccactgtcctgtcacgatggtttcgtccaccatgacgacaacgtaataatcagcttttgcagcgacagctttcgctttgatttctgctaatgcgtcatccggagaaccccgaaccatcgtgcttacgctacctattcgctgtaacccttgcgtctggtcgcggcgaatctcttgcggatggtccgttactggcggtgctggctgtggcgtaccttgcagtgcgctacaggcacttaacatcaacaccaataataaactggcaaaccggtaaataacgctattacgtttcctgctaaccatagtgtagtgccttattaatttaactttgggggaatgttcccgaattgttacctggtacgcgattttcgaatgaaaacgtgacgaaagcgtaacccacatctcaacattatgaactaataccgccagcagaaacttgtgctaaggatttcttcatgtcataccagacaaaaaggagagacagatgattgaaatagaaagtcgcgagctggcagatattcccgttcttcatgcttatcctgtcgggcaaaaagataccccgttaccgtgcgtaattttttatcacggctttactagttccagtctggtgtatagctattttgccgttgcgctggcgcaggctggtttgcgggtgatcatgccggatgcgcccgatcacggtagccgttttagtggtgacgcagcgcggcggttaaatcaattctggcaaatcttgctacaaagtatgcaggaattcactactttacgtgcggcaatagccgaagaaaactggctgcttgatgaccgtctggcagtcggtggcgcgagcatgggcgcgatgacggcactggggattaccgctcgccaccccacggtgagatgtaccgccagcatgatgggaagcggctattttacaagtctcgcccgtagtctgtttccaccgctgatacctgaaacggcagcacagcagaatgaattcaataacattgtcgcgccactggcagagtgggaagcgacaaaccacctggaacaacttagtgacagacctctactgctgtggcatggcctcgacgatgacgttgtgcctgccgacgaaagtctacgtttgcagcaggccttaagcgagacgggacgggataaactgctaacctgtagttggcagccaggcgtgcgtcaccgcattacgcctgaggcgttagatgctgccgtgacatttttccgccagcatctttaaacacgcagaatgctgaccccttgcgcttccagttgttgcaggatttccgggttagcatttttgccggtgataagcatatcgatttgatcggcacggctaaaaagcattcccgcgcgttcgccaatcttactgctatcaaccagtaccaccagtttccctaccacgctcagcatcttctgctctgccattgctgtcagcatatcggttttatacaacccttctgcggtcagcccttttccgctggtaaacatccagtgcccggcatagagactgttttcgctgccctgcgggcttaaagtgatggactgacttttgttgtactgtccgcccataatgatcacgctgtcatgttcttgatcgatcaggtaatttgccagcggtagataattagtgatgatttgcactggcttgccacacatttcccgcccaagcagaaacgcggtggagccgcagttgatgactacgctttcgcccggattaaccagctggctggccgctttagcgatacgtactttttcatcgtgattctgcgcctgatgcagattcatcggcgtccagcgcgggcgctgttgggtaatagcttctgcgccattgcgcacttttttcagtttgccgctttcgtcaagtttattgatatcgcgtcgcgcagtggcagggctaattcccagacgctcaacgactttctcaacggtcacaaagcccaattgtgcgagcatttccaggaggatttgatgtctttgtgcttcagtcatgagctattccgataaaatttgatttttttagatgatatttgaaatagccaggaaatactacgccggatagcgcgaacttctccacgctacccggtataaacgacagattacaggaaactcttgaacggcagatccggttcaatagtgaagcaatcatcgaaaccgcgcggatagtggtactcgaagttgtctttatccagcggccaggtaaatttgccacccacctgccagataaacggcttgaagccatacttcaggcgatcttttttcatctcccacagcacgcggatctcttgcggatcggcctggaagttactccagatatcgtggtggaacgggatcactactttcgcattcagcgcttcacccatacgcagcatatcggcgctggtcattttgtcggtgataccgcgcgggttttcgccgtagcttcctaacgccacgtcgatctgatgttcgttaccgtgcttcgcataatagttagagtagtgggagtcgccgctgtgatacagggagccgccaggcgttttgaacaggtagttcaccgcgcgatcgtccatgccatctggcagtacgccagccgctttttgatcggcaggcagggtgatcagtgcagtacggtcgaaagcatcaagcgcatgaatttcaatgtctttcacttttactacatcgcccggtttgaccacgatgcaacgctctttcggtacgccccagccaatccacaaatccacacaggttttcggtccgataaacggtacgtcatctgcacaattctgcatcacggcagcagcgacgttaacgtcgatatgatcgttgtgatcgtgagtcgccagtaccgcgtcgatctggcgaatcgcaaacggatcaagaacaaacggggtggtacgcaggtttggctgcagttttttcacgccagccatgcgctgcatctggtgaccctgtttcattaacgggttaccgtgactttgtttgccagtgccgcaccagaaatcaacgcaaacgttggtgccaccttcgcttttcaaccagatcccggtgcagccaagccaccacatcgcaaatgtgccaggagcgacctgttcttgttcaatttcttcattcaaccagctaccccactccgggaaagtgctcaggatccaggattcacgggtgatacttttcactttactcatcgccatttaccttcatgatagttcaattcgaatcaatatgtgattggttttgattaatcctgacactattttttcaggaaggcaatgaccattttttgactttttgccagggaagttgttgttgattttgagtatggaaagatttaatggaatgtgtaattcaattaactaaatgaatttaaatggataattgtttcgttgtgtgaatcccactctatccatgtggaattatttgcgggtcgcgtcacatttaatcataaataatcttgttgtgattacttttgaaaattagagtgagtgcacaacattccgggtgtgtggaatacccggttacctcttcttcaggagatcgttatggagatcctctacaacatctttaccgtgttttttaaccaggtcatgaccaatgccccgttgttgctgggtattgtgacctgtctgggctacatcctactgcgcaaaagtgtcagcgttattattaaaggcacgattaaaaccataattggtttcatgttgttgcaggcagggtccggcatcctcaccagcaccttcaaaccggtggtggcgaaaatgtccgaagtctacggcattaacggcgcaatttccgatacctacgctagtatgatggcaaccatcgaccgcatgggcgatgcctatagctgggtgggttacgccgtattgttagcgctggcgctgaacatctgttacgtgctgttgcgtcgcattaccggcattcgcacaatcatgttgaccggccacatcatgttccagcaggccgggttgattgccgttacgctgtttatcttcggctactccatgtggaccaccattatctgtaccgcgattctggttagcctctactggggcatcacttccaacatgatgtacaagccgactcaggaagtgacggatggctgtggtttctccatcggtcaccagcagcagtttgcaagttggattgcctataaagtcgcgccgttcctcggcaaaaaagaggagagcgttgaagacctcaaattgccgggctggctgaacattttccacgacaacatcgtctccacggcgattgtgatgaccatcttctttggtgccattctgctctccttcggtatcgacaccgtgcaggcgatggcaggcaaagtgcactggacggtgtacatcctgcaaactggtttctcctttgcggtggcgatcttcatcatcacgcagggtgtgcgcatgtttgtggcggaactctctgaagcatttaacggcatttcccagcgcctgatcccaggtgcggttctggcgattgactgtgcagctatctatagcttcgcgccgaacgccgtggtctggggctttatgtggggcaccatcggtcagctgattgcggttggcatcctggtcgcctgcggctccagcatcctgattattcctggctttatcccgatgttcttctctaacgccaccatcggcgtgttcgctaaccacttcggcggctggcgtgcggcgctgaagatttgtctggtgatggggatgatcgaaatctttggttgcgtctgggcggtgaaactcaccggtatgagtgcctggatgggcatggcggactggagcattctggcaccgccgatgatgcaaggcttcttctccatcggtatcgcctttatggccgtcatcattgtaattgcactggcttatatgttcttcgctggccgcgcgctgcgcgcagaagaagatgcagaaaaacaactggcagaacagtctgcttaataaggagttttgattatgaccgtacgtattctggttgtgtgtggcaacggacaaggcagttccatgatcatgaagatgaaagtggaccagtttttaacccaaagtaacattgaccatacggtaaacagctgcgcggttggcgagtacaaaagcgagttgagtggcgcggatatcatcatcgcttctacgcacattgcgggcgaaatcaccgtgaccggcaacaaatacgtggttggcgtgcgcaacatgctctctcctgccgactttggcccgaaactgctggaagtgatcaaagagcatttcccgcaggatgtgaagtaaggacgcgccatgaaattacgtgatagcctggcggaaaataaatccatccgcctgcaggctgaagcagagacatggcaggaagcggtgaaaatcggcgttgacctgctggtggcggcagatgtggtagagccgcgttactaccaggcgattctggatggcgttgaacagttcggtccttatttcgttatcgctccgggcctggcaatgccgcacgggcgtccggaagagggcgttaagaaaaccggtttctctctggtaacgctgaaaaagccgctggagttcaaccacgatgacaacgatccggtggatatcctcatcaccatggcggcggtcgatgccaatactcaccaggaagtgggcatcatgcagatcgtcaacctgtttgaagatgaagagaattttgaccgtttacgcgcctgccgtaccgagcaggaagtactggatctcattgaccgcaccaacgcggcagcttaagaaggaattgaacatgagtttaccgatgttgcaagtcgcgctggacaaccagactatggatagcgcctacgaaaccactcgcctgattgccgaagaagtcgacattatcgaagtgggcaccattctgtgcgtgggcgaaggcgtgcgtgcggttcgtgacctgaaagcgctctacccgcacaaaatcgtactggcagacgccaaaattgccgatgcaggcaaaatccttagccgtatgtgcttcgaagccaacgctgactgggtgacggtaatttgctgtgcggatatcaacaccgccaaaggcgcgctggacgtggcaaaagagtttaacggcgacgtgcagatcgaactgaccggttactggacctgggaacaggcgcaacagtggcgcgatgcaggcattgggcaggtggtttatcaccgcagccgtgacgcgcaggccgcaggcgtggcgtggggcgaagcggacatcaccgcgatcaaacgtctttccgatatgggcttcaaagtcaccgtcaccggaggcctggcgctggaagatctgccgctgttcaagggtattccgattcacgtctttatcgcgggccgtagtatccgtgatgccgcttctccggtggaagccgcacgtcagttcaaacgttccatcgctgaactgtggggctaaggagcggatatgttgtccaaacaaatcccgcttggcatctatgaaaaagcgctccccgccggggagtgctggctggaacgcctgcaactggcaaaaacgttaggcttcgattttgtcgaaatgagcgtagatgaaactgacgatcgcctgagccgcctcaactggagccgcgagcagcgtctggcgctggtcaatgcgattgttgaaaccggcgtgcgcgtgccgtccatgtgcctttctgctcatcgtcgtttcccgctgggcagtgaagatgacgcggtgcgggcgcaggggctggagattatgcgtaaagctatccagttcgcccaggatgtcggtattcgcgtgatccagctggcgggctatgacgtttactatcaggaagccaataacgaaacgcgtcgtcgtttccgtgacggcctgaaagagagcgttgagatggcaagccgcgcgcaggtgacgctggcgatggagatcatggattatccgttgatgagctccatcagcaaggcgctgggatacgcgcactatctcaacaatccgtggttccagctctacccggatatcggcaacctgagcgcgtgggacaacgatgtgcagatggagttgcaggccggaatcgggcatatcgtcgcggtacatgtgaaagacaccaaacctggcgtcttcaaaaacgtgccgtttggcgaaggtgtagtggatttcgagcgttgtttcgaaacgctcaaacagagtggctattgcgggccgtacctgattgagatgtggagcgaaacggcggaagacccggcggcagaagtggcgaaagcgcgtgattgggtgaaagcgcgcatggcgaaagcgggcatggtggaggcggcataatgcaaaagctaaaacagcaggtatttgaagccaacatggagctgccgcgctacgggctggtgacctttacctggggcaacgtcagcgctatcgaccgcgaacgcgggctggtggtgatcaagcccagcggcgttgcctacgaaaccatgaaagcggccgatatggtggtggttgatatgagcggcaaggtggtggaaggggagtatcgcccatcttccgacactgcgacgcatctcgaactctaccgtcgttacccgagccttggtggcattgtccatacccactccactcatgccaccgcatgggcgcaggcggggctggcgatcccggcgttaggcaccacgcacgccgactacttctttggcgacattccgtgtacgcgcgggttaagcgaagaagaggtgcagggcgagtatgaactgaacaccggcaaagtgattatcgaaacgctgggcaacgccgagccgctgcatacgccgggaattgtggtgtatcagcacgggccgttcgcctgggggaaagatgctcacgatgcggtgcataacgcggtggtgatggaagaagtggcgaaaatggcgtggattgcccgcggcattaacccacaactcaatcacatcgacagcttcctgatgaataaacacttcatgcgtaaacacggtcctaacgcttattacgggcagaagtaaaacacgcgctgcggaaatttccttcctcgggagataactggtctaattccgcagccgtttttcaaaaaaaagccccctgcgaagggggcaaagcaaactatggcaatgtttcgttggttatacctggtgttagcgataaatatccgcgctggcgtgcatattgccgttactccccggttcccgcatcagaattacgtggtagtacgttgcgccttgcgcatctgtttcttcatttaatgcctgacgtgcttcgctttcagtggcgaaattatgattgatataaatcacgcctaagctttgcacatcgtccatatttctggcctggtggttattaatttcaatggctgcccatgtatttgcacttagcaaaagcacagccagaagggctaaaacacgactgaacatagatacctcctcgacggctgactttgtgtgctctcctctgtgatgatcttctgatttaattttaatcaatgataaagaagttgatggtgaccatttctgatgcagttgttcaaaaaaacaccatgatgaagtgtgatgaacttcaaatcagcgtgttagaggttaattgcgaaaggggagatttatttcggctctgcccttgagtttagcgaggcatacaagtactataacgcgtcatttttcagccgacctttaacacgttccttgcctccccgggattcggctgacccagacaggaggctgaataatccgtaaggagcaattcgatgcgtcattacgaaatcgtttttatggtccatcctgaccagagcgaacaggttccgggcatgatcgagcgctacactgctgccatcactggtgcagaaggcaagatccaccgtctggaagactggggccgccgtcagctggcttacccgatcaacaaactgcacaaagcacactacgttctgatgaatgttgaagctccgcaggaagtgatcgatgagctggaaactaccttccgcttcaacgatgccgttatccgcagcatggttatgcgtaccaagcacgctgttaccgaagcatctccgatggttaaagcgaaagacgagcgccgtgagcgtcgcgatgatttcgcaaacgaaaccgctgatgatgctgaagctggggattctgaagagtaatttctgatgaccaaccgtctggtgttgtccggcaccgtgtgcagggctccccttcgaaaggtcagtccaagtggaattcctcactgccagttcgtgcttgagcatcgttctgtgcaggaggaagccggctttcaccggcaggcgtggtgtcaaatgcccgttattgttagcggacacgaaaaccaggccattactcacagtataacggtcggcagtcgcataaccgttcaggggttcattagttgccacaaggcaaagaacggactgagcaaaatggttttgcatgccgagcagattgaattgatagattctggagactaaccatatggcacgttatttccgtcgtcgcaagttctgccgtttcaccgcggaaggcgttcaagagatcgactataaagatatcgctacgctgaaaaactacatcaccgaaagcggtaagattgtcccaagccgtatcaccggtacccgtgcaaaataccagcgtcagctggctcgcgctatcaaacgcgctcgctacctgtccctgctgccgtacactgatcgccatcagtaatcggtcacggtccattaatacgactttgagaggataaggtaatgcaagttattctgcttgataaagtagcaaacctgggtagcctgggtgatcaggtaaacgttaaagcgggctatgctcgtaacttcctggtaccgcagggtaaagctgttccagctaccaagaaaaacattgaattcttcgaagctcgtcgcgctgaactggaagctaaactggctgaagttctggcagctgctaatgctcgcgctgagaaaatcaatgcactggaaactgttaccatcgcgtctaaagctggcgacgaaggtaaactgttcggttccatcggtactcgcgacatcgctgacgctgtaactgcagctggcgttgaagtggctaagagcgaagttcatctgccgaacggcgttctgcgtaccactggcgaacacgaagtgagcttccaggttcacagcgaagtattcgcgaaagtgatcgtaaacgtagtagctgaataattcgttattcaacgagacgtaaaaacgccgaccattggtcggcgttttgctttctatttttcgtcaggtattagtttcgcaagtagatccattcaccattctcttgtgtccataagtcaggatggtttgctggcgttagatacatacgagcgcaactgatgtctcgctcctgcggcactcgctcgaaacccaaaccgctgtagattgcggcactactacttaaggaacgcagaccaattttcaaatcatggggtaaatcagaatacgcgtttagcaatgcagcaatgatgaatccgagggcattagaaacgcctgtaacagtgcgaagttggtcgatataaagatcgattgttggtagttcagaactccagcaattaggcatttgggcaggaagggttacaacgtatcctatcgtttggccggtatagtctggagtaccataaccaggtcccaaaaccacttcgtgtattgtgtatttactgttgggttcgaaggattcgacatcttgcaataaatatttcagttctgcggttaacctcgcacccgcgtaagctttattgtatttctgggcgtgaatattatctaatgtagcttcatggttccatccaaaagaattatcaccattcattgtgattccatcgtaagcattacacctcgtcgctaacttattgaatgcttgccagtcactgagatctagtttgtggatctcaacagtacgtctgccatcgcaattatgatctcttccacgattactaagtaatgtagcgcgtgcgtattgatgaaattttaattttactggtttgtcggtggagctaaaacgagataaatatgcaggaaaactataaatagtcgttggtaatgtcattgtaatgttacctgtttaatgtttttataaatatcgcagctgaatgttcacagaaaaaaatcgatattaataaaaataagtttgttttctgaagtggtgaaaatagcggatggtgaaagatattaatatcaaaaatcgctcattatggatataacgatgcacccggggagaaaatgacttccacgccttacaccgtacattcttgttgtgcggtatgtaattattctacgctgtcggtatcggtgtattcgttaatcagcaggttagccagccacaaaaagccattgagaaaattattgattttacatgggattattatattgctaatccttggtttttaaaaattgtgcatagtgaaaatcaaagtaaaggtgtgcattatgcaaaaagtcagcgtctcttagaaattaaccatgcgcacttgcagttaatggaatccttattggatgaagggaagaaacacaatatttttaagccagatatcgacccattgcaggtgaatattaatattgctgcgcttggcggatattatttgatcaaccagcatacgcttggcctggtttatcacatcagtatggttagtccccaggcactggaagccagacgtaaggtcatcaaagagacaatccttagctggcttttggttgaccctagttctaccgcgcacgaataattaccgcgcacgaataaaactgccatccggctggcgggtgaacaggacctgttgattattccccgtatcaatggttaagcccgtcaccacgccgctggcgttctggcggattttcaccatctgcccgttttgcaaattactcagcggcttacccgcgccttctacctgcgccattgcatagacatcggtagcgggcagtccgtggtcgcggaacagctgcgccatcgttttaccgggttcgacacggtaagagcgccattgattatcaattccgctatctggctggaatggttgcgtttgggtagtttgcggctgctcttctggctggccttcctgtataggttctggagcgaccggagccacctgatcaggaccattttgtggggtaactaattgcgcccgcagctgttcttctgtcggcggttgactttggctctgaatatctaactgcgcttcacgcgtcaccaccggcgcgttgggcgtatcatcagatggaagcagaaatccgaccaccaatacaatggcggcaataatgatcccccgacgatgcatcggcggcagcgggtccatgaagcgaaaattgtccggcgcgtgccagactttctccagggttggttttagttcaaagcgcccgggcatggtttcctcctgctccgcgtcttgttcctcaatcatagcctatgaataagctaacgctatgatgtccgtggtaaacccgcctttattatattcatacgggatattgctattgtttctttttccctgggatttgtcatcattcccgcgacaaagttttacccaaagaagtgtggctgatatgctgcccgctactttataccctaagaaaggaaatacgatgaccaccccaacttttgacaccatcgaagcgcaagcaagctacggcattggtttgcaggtagggcaacaactgagtgaatctggcctggaagggctgctgccagaagcactggttgcaggtattgccgatgcgctggaaggcaaacatccggctgttccggttgatgtggtgcatcgcgcgctgcgtgaaatccacgagcgcgccgatgccgttcgtcgtcagcgtttccaggcgatggctgctgaaggtgtgaaatacctggaagaaaacgccaaaaaaagaaggtgtgaatagcaccgaatctggcctgcaattccgcgtgatcaaccagggtgaaggcgcaattccggcacgtaccgaccgcgttcgtgttcattacaccggtaaactgatcgacggcaccgtgtttgacagctccgttgctcgtggtgaacccgctgaattcccggttaatggcgtgatccctggctggattgaagcactgactctgatgccggtaggttctaaatgggaactgactatcccgcaggaactggcatatggcgagcgcggcgcaggcgcatccatccctccgttcagcaccctggtgtttgaagtcgaactgctggaaatcctctaagcagcgcattctgttcccctcgaacgagaggggagcaggcattcagcaataaacccttcagtttgccaaacggcgctattttgtgttgcaaagaccccgtaagcgtgtatttttgtgagctgtttcgcgttatcaccgtgatatgacactcactttaaacataaaattaacattagatctaaatcttagtattcatcccgcgtattgttacctaatatcgatgagtcccgatacagattcgtcgtatcatagactgactaaaggccgtagagcctgaacaacacagacaggtacaggaagaaaaaaacatggtagatcaggtaaaagtcgttgccgatgatcaggctccggctgaacagagcctacggcgcaatctcacaaaccgacatattcagcttattgccattggcggtgccattggtacggggttgtttatggggtctggcaaaacgattagccttgccgggccgagcatcattttcgtttatatgatcattggttttatgctctttttcgtgatgcgggcaatgggggaattgctgcttagcaatctggaatacaaatcttttagtgacttcgcttccgatttactcgggccgtgggcaggatatttcaccggctggacttactggttctgctgggttgtaaccggtatggcagacgtggtggcgatcacggcttatgctcagttctggttccccgatctctccgactgggtcgccagcctggcggtgatagtgctgctgctgacgctcaatctcgccaccgtgaaaatgttcggtgagatggagttctggtttgcgatgatcaaaatcgtcgccattgtgagcctgattgtcgtcggcctggtcatggtggcgatgcactttcagagtccgactggtgtggaagcgagtttcgcgcatttgtggaatgacggcggctggttcccgaaaggtttaagtggcttctttgccggattccagatagcggttttcgctttcgtggggattgagctggtaggtacaacagctgcggaaaccaaagatccagagaaaagtctgccacgcgcgattaactccattccgatccgtatcattatgttctacgtcttcgcgctgattgtgattatgtccgtgacgccgtggagtagcgtagtcccggagaaaagcccgtttgttgaactgttcgtgttggtagggctgcctgctgccgcaagcgtgatcaactttgtggtgctgacctctgcggcgtcttccgctaacagcggcgtcttctctaccagccgtatgctgtttggtctggcgcaggaaggtgtggcaccgaaagcgttcgctaaactttctaagcgcgcagtacccgcgaaagggctgacgttcagctgtatctgtctgctcggcggcgtggtgatgttgtatgtgaatcctagtgtgattggcgcgttcacgatgattacaaccgtttccgcgattctgtttatgttcgtctggacgattatcctttgcagctaccttgtgtatcgcaaacagcgtcctcatctacatgagaagagcatctacaagatgccgctcggcaagctgatgtgctgggtatgtatggcgttctttgtgttcgtggtcgtgttgctgacactggaagatgacactcgccaggcgctgctggttaccccgctgtggtttatcgcgctggggttgggctggctgtttattggtaagaagcgggctgctgaactgcggaaataaccgcattatcatgctggatggcgcaatgccatccagcttttagatcactcacccgccagcgcgcgtgggaacagtacattgttttccagactgatgtgatccatcaggtcatcaatcagttcattaatgccgttatacatcgctttccaggtggtgcaggcttctggcggcggtgtgacgttattggtggtgtgtttaatcacttccagcagttcgcccgcttcatcgtgctcgctttccattacgctgattggccccattgcctggctgcccatgccttgtttgatcatcgggaagaggatctgctcttctttcatcatgtggctggaaagctcttcatgcagcatggtcaggtattttgtcagcccttttggcacgctcggtttgtcggcgtgaacgcgctcgactttagtcgcttgcagaatcagctccggcagttgctcgcggtgacgatcgtggtagcgcacgatgatatggtcgatgatttctgccagcggggcgctacgccagtctttctcaatcggttgttcagcgagctttgccagttcagcttcaatgacctcaacatccagttctttacgtgccgccgcgcgcgccagcgtctgcttaccgccacagcagtaatccatatcatatttacgaaacagagcactagcgcgaggaatagagagcgccagttcacctaaaggttggtcgcgataagccatagctgatacctcattcttaataagataagatgtattttaaatgcatctttaaggcaaaagctataacccttacgtagcagaggcttatttaactcactgccagcgtgtcaactttcactgacagattcagttaaaggtttttctggttttgctctgaccgcgatgaccacgccaatcactaacagcgcgataccgctcagcgtcattagcggcggcatttgctggcggagtaaaaaggtgtacagcaaacctgccagcgtttcgaaaacaatcagcggcccgagaatcactgtcggtaatagctggctggcgacgttccagcagagtgcgccaacccaactgcaaagcacggctatcgcaaccatcagactaataaacaccagcggacgggggccaaagggtagggagaagtccggcgtttgcgtattcagccagtaacaagcgacgagatagccgataagactaaccggcagtgtgaccagcgcctgcgctgttgcccacatcatcggatgtttgtcgggattttcccgcagccagcgggcgttgcgcagggcataccacgcccagcagaccacggaaactaacgccagcacgatgccagaggtataacgtgcccagtcaaaatcggggagtccgtggtttaactcagcaatattcacacacgccaggccgatgccaatacaaatcagtgctggggcgagttttccccacgcgagtttgccgtcgcgctggctataaagcagattggcaaagacaggaatgaccaccggcagggtgccgataatcatcgtggaaacaggcgcgccagtacgttgaatggcactggcaaggcagaagtaatagatgaggttgcccatcatagtgagcatcaaggcggtaagccagtcgcgacgcgccaactgacgcagacgcacgcgtcccagccaggcaatgggcagcgcaattaaccctaacgccagataacgccccatgctctgcaacatcgccgggtattccggcacgatcaacggcccgacaaaaataagcccccacatcaaccctgctaacagggcgtacagcacgccgctaatcattactggcatccattgatctgtcagaagaaagttcaggaagcagacatgattgctcccggcatcccgtcattatcagagaggatgcgggaggatgccactttaattaattagttattaacattaaaaagatggcttacgctttcggctaacgttgtcgttgggtggccaatcaatttgctaagtgttttgctgtcatcaaacagaccgcctttgcttgcgccaacgtcagaatccgccagcatatccgccagtccgtcgggcagtccgacgcttttcagtgccgcggcgaaatcggcttcgctcagattttgataggtaacctgtttgccgctctgtttggtcagctctgccgctaactgtgtcaacgtccaggcactatcgcccgccagttcgtaaaccttgccttcgtgaccggcttcgctaatcacgcgtgccgcagctgccgcataatctgcccgcgttgcactggcgattttgccatcgcccgccgcaccgataaatacgccgtgttccagtgctgccggggcgctggcgaggtagttttcgctgtaccagccgttgcgcagcagggtgtaaacgatgccagaatcagccagcattttctccgtctcgatgtgctcatcggcgaggccgagcggggaggtatctgcatgtagcaggctggtataagcgataaatttcacgccagccgcctttgcggcattaataacattacgatgctgcggggcacgttgacccacttcgctggaagagatcagcagtagtttttccactccctgaagtgcagatgtcagtgcggcttcatcgccgtagtcagcctgacgcacggtaatgccttgtgctgccagggcttgggcttttgccggattacgaacgatagccactatttggctggcaggaaccgttttcatcaaggattcaataacatagtgaccaagttggccagtggcaccagtaatagcgatcatgggaagtctccatcgttttgtcttgtgtttaaatacgctaacacctaaacttacttttagtaagtacgtacaaaaaggtaagtatgaaatgagtcaggttagcctgagccaacaactgaaagagggtaatctctttgcggaacagtgcccgagccgcgaggtgttgaaacacgtcaccagccgttggggggtgttgattctggtggcgctacgcgaaggtactcatcgctttagcgacctgcggcgcaaaatcggtggggtgagtgaaaagatgcttgcgcagagcttacaggcgttagaacaggatggttttcttaaccgtatcgcgtatccggtggtgccgccgcatgtggaatatagcctcacgccgctgggcgagcaggtgagcgaaaaggttgctgcactggcggactggattgagttgaatttgcccgaggtgttggcggtgcgggatgaacgtgcggcataactgccggatgcgctgagcttatctggtctacggtgcatggcttgtagggcggataagatgcgccagcatcgcatccgccaataaatgccggatgcggttgatgatttataggccgaaaaagaagtgttttacttactcaaatccacctgataaatcgcaaacccgatatcatcggtcgcgactttattcatcggatactgccctttctctttaataaacgctgcggctttatcactcggagaggtttcgaaacggatatccagtttcttatcgccagctatcggtgctaaacgccagttgttatctgccgccgggtgaatttcccccgcacgtttgctctcatcagcaatccacgctgccagcacgctgcggttctcatccggactagcaaaagcgatatggctgtcgcccgtaccggcaaatttgccgccgtaagcgcgatagttattggtggcaaccaggaacatggcgttcggatcaatcggcttgccattaaaggtcaggttcttaatcctttccgcattggcattaatcatctggcactcgccgtcataacgggcgggctgggtaacatcaatctgataattcacaccatcaataacatcaaagttataagtgcggaaaccatcccagttgatgagactctgtggtttcgtgctgttgggatcaatctggttaaactgtcccgcggagcactccagccactctttcacctctttaccgctggctttcaccacaatcagcgtattgggatagagataaagatcggcggcattacggaaggtcaactggcctttttccacctccacatagcttgccgggtcatttttgcgaccaccgactttaaacggtgcggcagcactaagcaccggcagttttgccagatccggatcgccctgaatgtaatgctcgacatacgctttttgcgcgttgttcaccacctgcacggtcggatcgtcctgcaccagcgccagatagctatacatattgtcggcagatttaccgattggcttgctgacgaactggcgtgtggcatcgtgatcggctttgagtgtttctaccagcttgctgtcttccgccgcgagggattttttattagcgatgtcgtaaatcggtcgtgcttccgctttcgcctgcgtcacctgccatttaccgctgtcattactgagttgtaagtcgaccacaccaagatgatcgccccacatgcctggcattaccgccggaacaccattcagcgtgcctttggcgatatcagccccttcgatatcagcaaaatctttacctgggaaaacggcgtgagcatggccaaacataatggcgttaacgcccggaatttcactgaggtaataaacactgttttccgccatcactttatacggatcggcagatagcccggaatgtgccagaacgacaacaacatcggcacctttctcgcgcatttcaggcacgtatttgcgcacggtttcggtaatatcattcaccgtcactttcccggataaattagctttatcccagcccatgatttgtggtggcacgacgccaatatagccaatcttcagcgtctgtttttttccgtctttatcgaccacttcggtgtctttaattaaatacggtgtaaacattggctgtttggttctggcgtcaatgacgttggcatttacataagggaatttcgctcctgccagcgcatttttcaggtaatccagaccgtagttaaactcgtggttgccaagcgttccgacggtatagtccagcgtatttaatgccttatagaccgggtgaatatcacctgcttttaatcctttcgcgctcatgtaatcggccagcggactcccctgaatcaaatcgccgttatcaaccagtacgctgtttttcacttcattgcgggcatcgttaatcaggcttgccgtacgtaccagtccgaatttttccgtggcggtgtctttgtaataatcgaaatccatcatgttgctatgcagatcagtggtttccatgatacgcagatcgaccgtcgctgcattcacactggcggcaatcagcgtggccaggagcgttgcgctaaacttaatcatcagggacatccttttatcatcgggaatacgaaagaaaagggagaataaacgtcttacttatagaacagtgaagaatgccacaattttacgctttgaaaatgatgacactatcacagttggcgcattcattaacgatagggtataagtaaaacaataagttaacaccgctcacagagacgaggtggagaaatgttagatcaagtatgccagcttgcacggaatgcaggcgatgccattatgcaggtctacgacgggacgaaaccgatggacgtcgtcagcaaagcggacaattctccggtaacggcagcggatattgccgctcacaccgttatcatggacggtttacgtacgctgacaccggatgttccggtcctttctgaagaagatcctcccggttgggaagtccgtcagcactggcagcgttactggctggtagactcgctggatggtactaaagagtttattaaacgtaatggcgaattcaccgttaacattgcgctcattgaccatggcaaaccgattttaggcgtggtgtatgcgccggtaatgaacgtaatgtacagcgcggcagaaggcaaagcgtggaaagaagagtgcggtgtgcgcaagcagattcaggtccgcgatgcgcgcccgccgctggtggtgatcagccgttcccatgcggatgcggagctgaaagagtatctgcaacagcttggcgaacatcagaccacgtccatcggctctagcctgaaattctgcctggtggcggaaggacaggcgcagctgtacccgcgcttcggaccaacgaatatttgggacaccgccgctggacatgctgtagctgcagctgccggagcgcacgttcacgactggcagggtaaaccgctggattacactccgcgtgagagcttcctgaatccggggttcagagtgtctatttactaaattcagatggcagaaacagtgtatttcctgattctgccatcctgatttctcccaacctaaaaagttataaataaaaagagattgtatttaaagtgcaaaaattcaattgctaataagttacattttaataatgagcgttttttgatagtttacttctatagtgagatatttaatggcgacataaagtaaccaaataaaataaggttgtcatatgttacccaggatcagacacaataattttattggtgcggtggagttatttgtaaagtctagctatacaaaaacacatagtaacaatttttttaacaacatccatcatgcatttaagaaaaaagattggattagcaattatgatagcctgttaactttgagggagttctttcgttgcgcaactcagattgataaaagtggttatcaggtgcttagtagtaaaaatgaaactgttcacgccatggataagtttcttatcagtttcagccttaaagataacggtgccgaatatacaatgacattgcgaggtagtggatttgaatacgaagaaatacccataacaataaatgaatataacagtttcatggatttcaaaaaccgtgaatttccgttagaacaaaacagacgattgtatgcccgggatattctacagaaaaaacagtctgacataccgaaaaggattaaaggttatattcaccaggcgattggtgacgtgtctttaggttatgccttattggaggatatagtaagcaaattaaaacggggtaaatttgaactccaaataccaggaggtggaattaaagaatgcgatggatggtatatttacgaaaaaataattgatgataattttgccatagtcatagaatctttgggctttgcgcttaaaatctatggaggggatgaacgttttcgtaatggttcctctgttgttttggaggatgaagattactctcttatttataattttctggttaatgcaggttgccaacaagtcgaattagccgaacaagtggatgcgatagtaagtgcgaatctggccgcagatagcgatattaccaaagaaaagatttgcgagaaatataaaagcaccattgaggcgtttaaaaaagagcaactagcgttaccagtattagttcggcgtaagaacagtgagacttaattcccctatcccatagataacgataggggaaaattatttttgcagaatttatgttattgccattatttgagcaacttttgcagcaggtccatcacttgctgcacctcttccggtgtgagcgccccgtctttggcccattgcacgcgaccatccttatccagcaccactacagcggaactttcttcatccagctgccaggcaccgagcgcgacgccattgctatcgacaataaactggctccagggataaagctttttattactctccagactgctgcgcacaaacatcccactacccggaatcgcgtcgtcggtgttaacaatggtggtggtctggtaacgatcgtgcggtaacttcgcacttttaatcgcttcaatcagcgtcgcgtttttctcttttgcagaggtgcgaccagcaatatgttgcagtactcgcacttttcccactaactgcgcgctgttccaggttttgtagctaaactgatctttatcaagcaccaactcgccccgatcggtaatgccaatcggcggcactcgctgaccggtttcgaactgatgtgcggaagccatcatcggcaacagcaggcaggtgagtgccagaatcttgcgtagggtcatggtgtttccttcttatgatatgcaggtgatccgaccacttgggtctgagttttaatcatatgtgctatttatcgaatttcccgcaagtgtgatgccagtttgcggtcaagcgcacaaatcatatgaaaaatgaatgcttatactgaagaccgcgcttcggtaaaaagataattctgaataattgtaacctttaggtaaaaaaagttatacgcggtggaaacattgcccggatagtctatagtcactaagcattaaaatttgcgcctcataatagttgggccgattgtggcaccgcacaggcgtaatactcagcaggagataacaatgaaaattttccaacggtacaacccacttcaggtggcgaagtacgtaaagatcctgttccgtggacggttatacatcaaggacgttggcgcttttgaattcgataagggtaagattcttatcccaaaagtgaaggataagctgcatttgagtgtgatgtccgaagttaaccgtcaggttatgcgtctgcaaacagagatggcttaaccaaagtgctatgcagtaaaaagtgctatgcagtaataagacggctcctgattcaggagccgttgatgtttctgggggttacgcgacgctttcttctttatctttagcgtcaggcagttttgggctaagggcggtggccttgctgtcgatccgggtcaccagcagctggtcgatgcggtagttatcgatatccaccacttcaaatttgtagccggcgaatttcacgctatcggtgcgtttcgggatcttacgcagcataaacatcataaagccgccgatggtttcgtagttgccgctctgcgggaactcgtcaatatccagcacgcgcatgacgtcgtcaattggggtgccgccgtcaatcagccaactgttctcatcacgggcgacaatctgctcttccagcccctgaccgaccagatcgcccatcagcgtggtcatcacgtcattgagggtgatgatccccaccaccagcgcgtactcgttcatgatcaccgcgaagtcttcacctgcggttttaaaactttccaacgcctcactaagggttaacgtatccggcacaatcagcgtgttgcgaatttgtacgccgctgttcagtgccaggctttggttagccagcacgcggttcagcaggtctttagaatcgacataaccgatgatgtggtcaatatcttcattacagacgaggaacttagagtgcggatgttccgccaccttattcttcaggctttgctcatcttcgtggagatcaaaccaaatcacgttttcacgcggtgtcatactagacggaacggtacgggattccagctcaaagacgttttcaatcagctcgtgttcctgtttacgtaacacgcccgccagcgcaccggcttccactaccgcgtagatgtcatcagaagtgatgtcatctttacgtaccattggcagtttgaaaatacggaagattatgttcgccaggccgttgaagaaccacaccagcggggtgcaaacgtacaggcagaagcgcatcgggttgatgatacgcaaagccacagcttctggcgcaatcataccgatgcgtttcggggttaaatccgcaaacaggataaacatgccagtcactaagctgaaagagagaataaagctcagttgctcagagagctctgcgctcatatagcgggagaacaggctgtgaaaagctggagaaaatgccgcatcaccgacgataccgccgagaatcgccactgcgttcagaccgatttggaccacggtaaagaacatgccgggattttcctgcatattcagaacgcgttgggcatttatattgccttcatcagccagcagtttaagtttgattttgcgactggcggcaaggctgatctcggacatgctgaagaacgcacttacagcgatcaagcagagtatgactaaaatactgtttaacatatcttatccgacctttcaggccagatcctcggaaggggaagttgattaatttgtgtgaaatacacattgaaagccgattcgaagaaagtgaaccggcattttcagtggctagtatagcgtaaggtactgtaaagccgccagagggttaaaattcagacagctgaaaaatgcaaaactgcctgatacgctatgccgatcaggcctacgcagtccttgcaatatattgaatttggacgattttgtaggcctggtaagtcgtttacgccgcatcaggcatagacaaagagcactttatcaacaaactacatttgtacccgtaacgttatgcttccggcggcagacagacgccaattccgccaattccacagtaaccatacgggtttttatgcagatattgctggtggtcatcttcggcataataaaacggtgtggcgttagcgatttccgtggtgatgtgacgatcgtcatcggcggcaagcatcgccgcctgaaaacgttccagactggcgcgagctgcggcatcctgttctggggtcagcggataaatcgcactacgatactgcgtgccgtggtcattgccctgacgcattccctgggcgggatcgtgattctcccaaaatacctgtagcaactgctcatagctgatgacggaaggatcgtaaacaatgcgtaccgcttcggcatgacccgtatcaccggagcacacttcccgataagtcggatttggcgtatagccgccggtatagcctgcggcggtgctgtaaacgccgggtaactgccagaacagacgctccacaccccagaaacaacccatcgcaaaaatggcaatctccattccgtcaggtacattggtcatactgtgaccgttgaccgcatgcagcgtggctacgggcatcggggtgttacgtccaggcagggcatcggcgggggaaaccagatgctttttatcaaataaactcatggtgtcgctctcccgaaaatcggtcattggggttaaggttgtaacaagaggcgtatttgcacacaataaccaccgtgaataggtctaaagtaaaacataagaaatatttggggtttagtctgctttttaatccatattactggatttttgttaagccgtttaacggcgttccaggggcaggaaaaaaggatattcaggagaaaatgtgcgctatatccgacagttatgctgtgtaagcttactctgcttaagcggatctgccgtcgccgcgaacgtccgtctacaggtcgaggggttaagcggacagctggaaaagaacgttcgtgcgcagctttctacgattgaaagtgatgaagtgacgccagaccgtcgctttcgcgcacgcgtcgatgatgccatccgcgaaggtctgaaagcgctgggttattaccagccgaccattgaatttgatctccgtccaccgccaaagaaagggcggcaggtattgatcgccaaagtcacgccaggcgtgccggtgttaattggcggcaccgatgtggtattgcgcggcggcgcgcggaccgataaagactatttgaaattgctcgatactcgcccggctattggcacggtactgaaccagggcgattatgaaaatttcaaaaagtccttaaccagcattgcgttgcgtaaaggttatttcgatagcgaatttaccaaagcgcagctgggcattgcgctcggcctgcataaagccttctgggatattgattataacagtggcgaacgttaccgctttgggcatgtgacctttgaaggaagtcaaatccgcgatgaatacctgcaaaatctggtgccgtttaaagagggcgatgagtacgaaagcaaagatctggcagaactgaaccgccgactttctgctaccggctggtttaacagcgtggtggtggctccacaatttgataaagcgcgcgaaacgaaagtattaccattgacgggcgtggttagcccgcgaacagaaaacaccatcgaaaccggggtcggttactctacggacgtgggaccgcgcgtgaaagcgacgtggaaaaagccgtggatgaactcttatggtcacagtctgaccaccagtactagtatttccgcgccggaacagaccctcgacttcagctataaaatgccgctgctgaagaatccactggaacaatattatttggtgcagggcggttttaagcgcactgacctgaacgataccgaatctgactccactacgctggtggcttctcgctactgggatctctccagcggctggcagcgtgccattaacctgcgctggagtctcgaccactttactcagggtgaaattaccaataccacgatgctgttttatcctggggtgatgattagccgcacgcgttctcgtggtggcctgatgccaacctggggcgacagccaacgctactctatcgactactccaacacggcctggggtagtgatgtcgatttctccgttttccaggcgcagaacgtctggatccgcacactgtacgatcgccatcgttttgttacacgcggcacgctgggctggattgaaaccggtgatttcgacaaagtaccgccggatctgcgtttcttcgccgggggcgaccgcagtattcgtggctacaaatacaaatctatcgctccgaaatacgccaacggtgacctgaaaggggccagcaagttgataaccggaagcctggaataccagtacaacgtgaccggaaaatggtggggcgcggtgtttgtcgatagtggcgaagcggtaagcgatattcgccgcagcgactttaaaaccggtaccggggtcggcgtgcgctgggaaagcccggtcgggccaatcaaactcgattttgccgtaccggtcgcggataaagacgaacacgggttacagttttacatcggtctggggccagaattatgagtttatggaaaaaaatcagcctcggcgtggttatcgttatcttactgttgctgggaagcgtggcgtttctggtgggcaccaccagcggcctgcatctggtatttaaagcggcggatcgctgggtgccaggactggatattggcaaggtcaccggcggctggcgcgatctcaccttgtctgacgttcgttatgagcagccaggcgtggcggtaaaagcgggcaatctgcatctggctgtcgggcttgagtgcctgtggaacagcagtgtttgtattaatgatctggcgctgaaagacattcaggtcaacatcgacagtaaaaaaatgcctccttctgaacaggttgaagaagaggaagatagcggtccgctggatctctccacgccgtatcccatcaccctgacacgggtggcactggacaacgtcaacattaagattgatgacaccacggtaagcgtgatggacttcacctccggcctgaactggcaggagaaaaccctgaccctgaaaccgacgagcctgaaaggcctgctgattgctctgccgaaagtggcggaagtggcgcaggaagaagtggtcgaaccgaaaattgaaaatccgcagccggatgaaaagccgctcggcgaaacgctgaaagatctcttttctcgcccggtattgccggaaatgaccgacgtgcatttgccgcttaacctgaacattgaagagtttaagggcgagcagctgcgcgtgacgggcgacacggacatcaccgtgagcaccatgctgctgaaagtgagcagcattgacggcaatactaaactggacgccctggatatcgattccagtcaagggatcgtcaacgccagcggcacggcgcagctgagtgacaactggccggtggacatcactctcaacagtacactgaacgtggagccgttgaaaggtgaaaaagtgaagctgaaaatgggcggcgcgctgcgcgaacagctggagattggcgttaatctttccggtccggtggatatggatttacgcgcccagacgcgactggcggaagccggattgccgctcaacgtggaagtgaacagcaaacagctttactggccgttcactggtgagaagcagtatcaggcggatgatctgaaactgaaacttaccggcaaaatgaccgattacacgctctctatgcgtacggcagtgaagggacaggagatcccgcccgcgactattaccctcgacgccaaaggtaatgaacagcaggtcaatctcgacaaactcaccgtcgcggcgctggaagggaaaactgaactcaaggcgttgctcgactggcaacaggccattagttggcgcggtgagctaacgcttaacggcattaacaccgccaaagagttcccggactggccgagcaaactcaatggcttgattaaaacccgcggtagcctgtacggcggcacctggcagatggacgtgccggagttgaagctgaccggtaacgttaaacagaacaaagtgaacgttgacggcacgctgaaaggcaacagttatatgcagtggatgatcccagggcttcatctggaactcgggccaaacagtgccgaagtgaaaggcgagctgggggtaaaagatctcaatcttgatgccaccatcaacgcgccggggctggataacgcgctgccggggcttggcggtacagcgaaagggctggtgaaagtacgcggcacggtggaagcgccacaactactggcagatatcaccgcgcgcggcctgcgctggcaggaactttccgtggcgcaggttcgcgtggaaggcgatatcaaatccaccgatcagatcgccgggaaactcgacgtacgcgttgagcaaattagccagccggatgtaaatatcaacctcgtcaccctgaatgccaaaggcagcgaaaagcagcacgagctacagttgcggattcagggggagcctgtctccgggcagcttaatctggcaggaagttttgatcgcaaagaagaacgctggaagggaactcttagcaatacccgcttccagacgccggttggcccgtggagcctgacccgcgatattgcgctggattaccgcaataaggagcaaaaaatcagcatcgggccacactgctggcttaacccgaatgcggaactgtgcgtgccgcaaactatcgatgcgggggccgaagggcgtgcggtggtgaatctcaaccgcttcgacctcgccatgctgaaaccgtttatgccagaaaccactcaggccagcggtatcttcacgggtaaagcggacgttgcctgggacaccacgaaagaggggctgccgcagggcagtatcacccttagcgggcgtaacgtgcaggtaacgcaaaccgtcaacgatgcggcgctgcccgtggcgtttcagacactgaatctgacggcggaattgcgtaacaaccgtgccgaattgggctggaccatccgcctgaccaataacggccagtttgatggacaggtgcaggtgaccgatccgcaaggccgccgtaatcttggtggcaacgtcaatatccgtaacttcaaccttgcgatgataaaccccatctttacccgtggggaaaaagcagcggggatggtgagtgccaacttgcgtctgggtggtgatgtgcaaagcccgcagttgtttggtcagcttcaggttacgggtgtggatatcgatggcaactttatgccgtttgatatgcaaccgagccagcttgcggtcaactttaacggtatgcgcagcacgcttgccggtacagtacggacccagcagggtgaaatctacctgaacggtgatgccgactggagccaaattgaaaactggcgggcgcgggtaacggcgaaaggcagtaaagtgcggatcaccgtgccgccgatggtacgaatggatgtaagcccagatgttgtattcgaggctacaccaaacctgtttaccctcgatggtcgcgtggatgtcccttgggcgcgcatcgtggtgcacgatctgccggaaagcgcagtaggcgtctccagcgatgtggtgatgcttaacgataacctgcaaccggaagagccgaaaacggcgagcattccgattaacagtaacctgattgtccacgttggcaacaatgtgcgcattgacgcctttggcctgaaagcgcggctgacgggcgatctcaatgtcgttcaggacaaacaagggctgggtctgaacgggcagatcaacatccctgaagggcgcttccatgcctatggtcaggatctgattgtgcgtaaaggtgagttactgttctctggtccgccagatcaaccgtatcttaatattgaagctattcgtaacccggatgctacagaagacgacgtaatcgccggagttcgcgtcactggtctggcggacgaaccgaaagcggagatcttctctgacccggcgatgagccaacaagctgccttgtcttatttgctacgtggacaagggctggagagcgatcagagcgacagtgcggcaatgaccagcatgctgattggtttgggggttgcgcaaagtggccagattgtgggtaaaatcggcgagacgtttggcgtaagcaatttagcgctcgacacccagggagtaggcgactcctcccaggtagtggtcagcggctatgtattgccaggtctgcaagtgaaatacggcgtgggtatatttgactctatagcaacactcacgttacgttatcgcctgatgcctaagctatatctggaagccgtgtctggtgtagaccaggcactggatttgctctatcagttcgagttttaacaatgcgaatatttgtctacggcagtttacgccacaaacaaggcaacagtcactggatgaccaatgcccagttactgggcgatttcagtatcgataactaccagttgtatagcctgggccactatccaggcgcagttccggggaacggaacggtacacggtgaagtttatcgtattgacaacgccacgctggccgaacttgatgccttgcgcaccaggggcggtgaatacgcgcgccagttgattcagacgccgtacgggagtgcatggatgtacgtttatcaacgacccgtcgatggattaaagctaattgaaagcggcgactggttagacagggataagtaaccatatgcatacgccaccttcgggtggcgttgttttttgcgagacgactcgcattctgttttgtaattccctcaccttttgcttttctctccgagccgctttccatatctattaacgcataaaaaactctgctggcattcacaaatgcgcaggggtaaaacgtttcctgtagcaccgtgagttatactttgtataacttaaggaggtgcagatgcgtattaccataaaaagatgggggaacagtgcaggtatggtcattcccaatatcgtaatgaaagaacttaacttacagccggggcagagcgtggaggcgcaagtgagcaacaatcaactgattctgacacccatctccaggcgctacagccttgatgaactgctggcacagtgtgacatgaacgccgcggaacttagcgagcaggatgtctggggtaaatccacccctgcgggtgacgaaatatggtaaagaaaagtgaatttgaacggggagacattgtgctggttggctttgatccagcaagcggccatgaacagcaaggtgctggtcgacctgcgcttgtgctctccgttcaagcctttaatcaactgggaatgacgctggtggcccccattacgcagggcggaaattttgcccgttatgccggatttagcgttcctttacattgcgaagaaggcgatgtgcacggcgtggtgctggtgaatcaggtgcggatgatggatctacacgcccggctggcaaagcgtattggtctggctgcggatgaggtggtggaagaggcgttattacgcttgcaggcggtggtggaataaggtgtgtttatttatcgcgggcataaaaaaacccttactaaccgaagcccggcgttcagggttattacgccagaagaacttatttattctttgcgcgctcgaaggaggcaacgatttcagctttagcggcttctgcgttttcccaaccttcaactttcacccacttgcctttttcgaggtctttgtagtgctcgaagaagtgagcgatttgcgctttcagcagttcaggcagatcgttaacgtctttaatgtgatcgtattctttgctcagcttgctgtgcggaaccgcaaccagtttcgcatcttcaccggcttcgtcggtcattttcagaacgccaaccggacggcaacggatcacagaacccggctgcagcgggtacggagttgggaccagtacgtcaaccgggtcaccgtccagagacagggtgtggttgatgtaaccgtagttgcatggatagaacatcgcggtggacatgaagcggtcaacgaacagtgcgccgctctctttgtcgatttcgtatttgatcggatctgcgttagccgggatctcaataacaacgtagatgtcttccggcagatctttacccgcagggacgttgagtaagctcatgtctgtttcctttaaaaatatgtggcaaacaagtgccgagtattatagccaactcgcgccgaatgtcttcgcttgttttcgtcttcattttcctttttcaccagttttaagacggtatacagagcaggaaaatccataaccgtagccgcatttttcatagtgagatgaaagcgattacaaacttgtgattaacgttttatttacttttttgaagtgtgatgtaacgcaatctgttacataacgaattgtctatagttttttcgcgaacatcttttaaccaataataactaccccgacgaggacaaccctatgtggaaacgcttacttatagtctctgcagtcagcgcagccatgagctctatggcgttggccgctccattaaccgttggatttagccaggtcggaagcgaaagtggctggcgtgccgcagaaaccaatgtggcgaaaagtgaagccgaaaagcgcggaatcacgttgaaaattgccgatggtcagcaaaagcaggaaaaccagattaaagcggtacgttccttcgttgcacaaggggtggatgcgatctttatcgctccggtggtcgcgacaggttgggaaccggtattaaaagaggcgaaagatgccgaaatcccggtattcttgctcgatcgttccattgatgtgaaagacaaatctctctatatgaccaccgtcactgccgacaacatcctcgaaggcaagttgattggtgactggctggtaaaagaagtgaatggcaaaccatgcaacgtggtggagctgcagggcaccgttggggccagcgtcgccattgaccgtaagaaaggctttgccgaagccattaagaatgcgccaaatatcaaaatcatccgcagccagagtggtgacttcacccgcagtaaaggcaaagaagtcatggagagctttatcaaagcggaaaacaacggcaaaaacatctgcatggtttacgcccataacgacgacatggtgattggtgcaattcaggcaattaaagaagcgggcctgaaaccgggcaaagatatcctcacgggttccattgacggtgtaccggacatctacaaagcgatgatggatggcgaagcgaacgccagtgttgaactgacgccgaatatggcaggtcccgccttcgacgcgctggagaaatacaaaaaagacggcaccatgcctgaaaagctgacgttaaccaaatccaccctttacctgcctgataccgcaaaagaagaattagagaagaagaaaaatatggggtattgagggttgctatgcctgatgccgattcgtaggccggataaggcgctcgcgccgcatccggcgatggtgcactgaagcctgatgcgacgcttaccgcgtcttatcatgcctactgggagcacgctttacaccgggggaaaccatgacgaccgaccaacaccaggagatcctccgcaccgaaggattaagtaaatttttccccggcgtcaaagcgttagacaacgttgatttcagcctgcgccgtggcgaaatcatggcgctgctcggtgaaaacggggcgggaaaaagtacgctaatcaaagcattaactggtgtataccacgccgatcgcggcaccatctggctggaaggccaggctatcagtccgaaaaataccgcccacgcgcaacaactcggcattggcaccgtctatcaggaagtcaacctgctacccaatatgagcgtcgctgataatctatttataggccgcgaacccaaacgcttcggccttctacgccgcaaagagatggaaaagcgcgccaccgaactgatggcatcttacggtttctccctcgacgtgcgcgaaccgctcaaccgctttagtgtcgcgatgcagcaaatcgtcgctatttgtcgggctatcgatctctctgccaaagtgctgatcctcgatgaacccaccgccagtctcgacacccaggaagtggagttactgtttgacctgatgcgtcagttgcgcgatcgcggcgtcagcctgatttttgtcactcactttctcgatcaggtctatcaggtcagcgatcggatcaccgtcttacgcaacggcagtttcgtaggctgtcgggaaacgtgcgagctaccgcagatcgaactggtaaaaatgatgctggggcgcgagctggatacccacgcgctacagcgtgccgggcgaacattgttgagcgacaaacccgttgccgcgttcaaaaattacggcaaaaaaggaacgatcgcaccgtttgatctcgaagtacgccccggcgagatcgtcggtctggctggattgctgggaagtggacgtaccgaaaccgccgaagtgatcttcggtatcaaacctgctgacagcggcacggcgttgatcaaaggcaaaccgcaaaacctgcgaagcccacatcaggctagcgtactgggcattggcttctgcccggaagacaggaaaaccgatggcatcatcgctgccgccagcgtgcgggaaaatatcatcctcgctctccaggcccagcgcggctggctacgtcccatttcccgcaaagaacagcaagagattgccgaacgctttatccgccagcttggcattcgcacacctagtactgaacaaccgattgaatttctctccggcggcaatcagcaaaaagtgttgcttagtcgttggctactgacccgaccgcaatttctgatcctcgatgagccaacccgcggcattgatgttggtgcccacgccgagatcatccgcctgattgaaacgctatgcgccgatggtctggcgctgctggtgatctcctccgaactggaagagctggtgggctatgccgatcgggtgattatcatgcgcgatcgcaaacaggtggcggagatcccgctggcagagctttccgttccggcgatcatgaacgccattgcggcgtaaggagaacagtgtgatgcctcaatctcttccggacaccactacgccaaaaaggcgctttcgctggccgacggggatgccgcagctggtagcactgttgctggtgctgctggtcgatagcctggtagccccgcatttctggcaggtggtgcttcaggatgggcgtttgttcggtagccccatagacattcttaaccgtgcagctcccgttgcgttactggcgattggcatgacgctggtgatcgccaccggtgggattgatctctccgtaggggcggtgatggctatcgccggagccacaacggctgcgatgacggtcgcgggattcagcctgccgattgttttgttaagcgccctgggcaccggcatcctggcgggattgtggaacggcatactggtagcgatcctcaaaattcagccgtttgtcgccactctgatcctgatggtcgccgggcgcggcgtggcgcaactgatcaccgccgggcagatcgtcacgtttaacagcccggatctcagttggttcggcagtggaagcctgttgttcctgccaacgccggtcattatcgcggtgctgacgcttatcctgttctggctgttgacccgcaaaacggcgctggggatgtttatcgaagccgttggtatcaacattcgggcggcaaaaaatgccggggtaaacacgcgaatcatcgtcatgctcacttatgtgttgagcgggctgtgtgcggcgattgcgggcattatcgtggcggcggatattcgcggtgccgatgccaacaacgctgggttatggctggagctggacgccattctcgcggtggtgattggcggcggaagcctgatgggcgggcgctttaacctgctacttagcgtggtgggggcgctgattattcaggggatgaacaccggaattttgcttagcggctttccgccagagatgaaccaggtggtgaaagcggtggtggtgctttgcgtgctgattgttcagagccaacgctttatcagtctgattaaaggagtacgtagccgtgataaaacgtaatttgccactgatgatcaccatcggcgtctttgtgttgggttatctttactgcctgacccagtttcccggttttgcttccacaagagtgatctgcaatatcctgaccgataatgcctttcttgggatcattgccgttggcatgacctttgtgatcctcagtggtgggatcgatctctccgtcggtagcgtgatcgcctttactggcgtgtttctggcaaaagtgattggcgatttcggcctcagcccgctgctggcgtttccgctagtgctggtgatgggctgtgccttcggcgcatttatggggcttctgatcgacgccctgaagatcccggcatttatcattacgcttgcggggatgttctttttgcgcggcgtcagctatctcgttagcgaagagagcattccgataaaccatcccatttatgacacgctcagtagccttgcgtggaaaatccctggcggcggtcgcttaagtgcgatgggactgctgatgttggcggtggtggttatcggcatattcctcgcgcatcgtacccgttttggtaatcaggtatacgccattggcggcaacgcaacgagcgcgaatctgatggggatttccactcgcagcaccactattcgcatttatatgctctccaccggactggcaacgctggcggggattgtcttcagcatttatacccaggccggatatgcgctggcgggcgtaggtgtggaactggatgctatcgccagtgtggtaattggcggtacgcttttgagcggtggcgttggaacggtattagggacgctttttggcgtggcgattcagggactgattcagacttacataaactttgatggcacgctgagttcctggtggacgaaaatcgccatcggtattttgttgtttatttttatagcattacagcgtggattaacggtgctgtgggagaatcgtcagagtagcccagtgacaagagtcaacattgcgcagcaataaaaacgcctctccgtgtggagaggcgcaggagattacgcgtccgggaactcacggataaagcgttcgacatcttcaaccatatggtcgttgccgacaaagaaactacggcgctggtgcagggtttccgggatgatatccagaatacgctctttgccatcgctcgctttaccgcccgcttgttccgccaggaatgccatcgggttgcactcatacagcaaacgcagtttgccgtccgggtggctggcggtgcttgggtagagataaataccgcctttcagcaggttacggtggaaatccgcgaccagactaccgatataacgactggtataagggcggttggtggatttatcttcttcctggcagaatttaatgtacttcttcaccccgttcggaaacttaatgtagtttccttcgttgatggagtaggttttgcctttctccgggaagcgcatccgttcctggcacaggcagaaaacgccgaggctaggatcgtaagtaaaggcgtgaacaccgcatccggtggtgtaaaccagcatggtagaggagccgtataccacgtaacctgccgcaacctgtttgttaccaggctggaggaaatcttcttccgttaccggcgtgccaacaggcgtaacgcggcggtagatggagaaaatggtaccgacagagacgttaacatcgatgttggagctgccatccagggggtccatcagcaccacgtattttgcgtgttcacagccttcaaagacgacaatctcatcttcttcttcagaggcaatgcccgcaacgatatcgcgtgctttcagtgcggctttcagtttttcattagcgaacaagtcgagtttctgctgaacctcgccctgcacgttctcagcaccgctggcacccaggatatcaaccagtcctgctttgttgatatcgcgatggataatcttggcgcccagttttattgcgctcagcaaagcagtgagctcaccggtagcatgagaaaactcgtgctgcttttcgacaataaattcacctaacgttttcataaaactttccctgcaatgtttatggagtaaagcgaccgcaacaatcttaacaaataatctcaatgttgcgctcaggtgaatcgcgccagcaaattacggattatcctgaaatgcgtttctcacttgcccgacatatgcgtaaaatgagcggcagattaaaaaaggatagtgacgtatgcgcattcatattttaggaatttgtggcacatttatgggcggtctggcgatgctggcgcgccagttaggccatgaagtaacgggtagcgacgccaatgtgtatccgccgatgagcaccttacttgagaagcaaggcattgagctgattcaggggtacgatgccagccagctcgagccgcagccggatctggtgattattggcaacgccatgacccgtggaaatccgtgtgtggaagcggtactggaaaaaaatatcccttatatgagtggtccacagtggctgcacgattttgtgctgcgcgaccgctgggtgctggccgttgccggtacacacggcaaaaccaccaccgcgggaatggcgacctggattctggaacagtgtggttacaaaccgggctttgtaatcggcggtgtgccggggaactttgaggttagcgctcatctgggcgaaagcgacttctttgttatcgaagcggatgagtatgactgcgccttcttcgacaaacgctctaaatttgttcattactgcccgcgtacgctgatcctcaacaaccttgagttcgatcacgccgatatctttgacgacctgaaagcgatccagaaacagttccaccatctggtgcgtatcgttccggggcagggccgtattatctggccggaaaatgacatcaacctgaaacagaccatggcgatgggctgctggagcgagcaggagctggtgggtgagcagggtcactggcaggcgaaaaagctgaccaccgatgcttccgaatgggaagttttgctggatggcgaaaaagtgggcgaagtgaaatggagcctggtaggcgaacataatatgcacaatggcctgatggcgattgcagcggctcgccatgttggtgtagcgccggcagatgccgctaacgcgctgggtagctttattaatgctcgtcgccgtctggagttgcgtggtgaagcgaatggcgtcacggtatatgacgattttgcccatcacccgacggcgattctggcaacgctggcggcgctgcgtggcaaagttggtggtacggcgcgcattattgctgtgctggagccgcgcagcaataccatgaaaatggggatctgcaaagacgatctggcacctagtttaggtcgtgccgatgaagtcttcctgctgcaaccggcgcatattccgtggcaggtggcagaagtggcagaagcctgcgttcagcctgcacactggagtggcgatgtggatacgctggcagatatggtggtgaaaaccgctcagcctggcgaccatattctggtgatgagcaacggcggttttggtgggatccatcagaaactgctggatgggctggcgaagaaggcggaagccgcgcagtaattcggccttagccagatatagtatgcgtaggccggataaggcgttcacgccgcatccggcatttgagcatagtgcctgatgcgacgcttgatgcgtcttatcaggcctacaggtgcaccgtatccggcaaaccatactcacatcaacaacgaaaattacccttcgttctccgctaactcgcgcagatactggaaaatctggcgtgcggatttcggcggcttattcccttctttctctttcttcgcgttgcggatcagagtacgcagttgctgacgatcggcatcgggccacagatttaatacctcagcgatggcgtcatcaccttgatcgatcagacgatcgcgcaggttttccagtttatggaacagcaccacctgctggttgtgacggtttttcagcttatccagcgcctgacgaataggctctacgtcgcgctggcgcagcatcttaccgatgagctgcaactggcggcggcgaccttccatcttaatacgctgggcgagctcaatagccgcgcgcagatccgcatctaacgggatcttatccagcgcgtttttccccagatcaacaatttccgcgccaaggcgttttagctcctcggcatcacgtttaatttcacttttactgacccagataatttcatcgtcttcgtcttcgatgtcatcaccgggaacgtcgtcgagccagtcttcgggctgcttagtcatctcaggctccttaaaaaaagaggctaatgttaccagttaagatgcgcactgaaaaacggttctctgttagacttcagagaaactctctacattatggcacttgcaatgaaagtaatctctcaagttgaagcgcagcgcaagattctggaagaagcagtttccactgcgctggagttggccagtggcaaaagcgacggtgcggaagttgccgtcagcaagaccaccggcattagcgtaagcacgcgttatggtgaagtggagaatgttgaattcaatagcgatggcgcgctggggatcactgtttatcaccagaaccgcaaaggtagcgcaagttccaccgatttaagcccgcaggccattgcccgtactgtacaggcggcgctggatattgcccgttataccagcccagatccctgtgccggcgtggcagacaaagagctgctggcctttgacgcaccagatctcgacttgttccaccctgcggaagtttccccggatgaagccattgaactggcggcccgcgcagaacaggcggcattgcaggcggacaaacgcatcaccaataccgaaggtggcagctttaacagccactacggtgtcaaagtttttggcaacagccacggcatgttgcagggttactgcagtacgcgtcatagcctctccagctgtgtaattgccgaagaaaatggcgatatggagcgtgattacgcctacaccattggtcgtgcgatgagcgatctgcaaacgccagagtgggttggggccgactgtgctcgccgtactttaagccgtctgagtccgcgtaaactctccaccatgaaagcgccagtcatttttgccaatgaagtggcaaccgggctttttgggcatctggtgggggcgatagcgggtggaagcgtttatcgtaaatctaccttcctgctggatagcctgggtaaacaaattctgccggactggctgaccattgaagagcatccgcatctgctgaaagggctggcgagcacgccattcgacagcgaaggtgtgcgcaccgagcgtcgcgatattattaaagatggcatcctgactcagtggctgctgaccagctacagcgcgcggaaactggggctgaaaagcaccggacatgcgggcggtattcacaactggcggattgccggacaaggtctaagcttcgagcagatgctcaaagagatgggcaccgggctggtggtgacggaattgatgggccagggcgtgagtgccattaccggtgattattcccgtggtgcagcgggcttctgggtagagaatggcgaaattcagtatccggtgagcgaaatcaccatcgcaggtaatttaaaagatatgtggcgcaatattgtcaccgtcggtaacgatattgaaacacgcagtaatatacagtgtggttctgtgctgttgccggagatgaaaatcgccggacagtaaaaaaactggcgcgacctgccgcgctataaactaaaaaattacacaaaatcattcgcactgcatcgagacggaaagtgaatgagggccggggagcgtactcgcagtacgtgacccggtcgaatgagcgtagtcgtcgatgaggcagtgtgaaggatgaagtgtaaataaaaaaggaactattcttgcagtctcctcgttggtattcagttcggcgtcatttgctgctgatctcgaagacaatatggaaaccctcaacgacaatttaaaagtggtcgaaaaagccgataacgcggcgcaagtcaaagacgcgttaacgaagatgcgcgccgcagcgctggatgcgcaaaaagcaacgccgccgaagctcgaagataaaagtccggacagcccggaaatgaaagatttccgccacggtttcgacattctggtcggtcagattgacgacgcgctgaagctggcaaatgaaggtaaagtaaaagaagcgcaggctgctgcagagcaactgaaaacgacccgcaatagttatcacaagaagtatcgttaattcctcatttccctgttgcctgcactcaggtaacagggaacttatcatcgcaaatgatgcaccacctgattgctgctgccgcgccagatcagggaagggtcttttaaatcctgcacaaatttgccgtcgaccagcacgttaatcaaatcaacaacctgcatttgcgcagcgttgagttcgtcgagtttatagcctgtccacacccagatgtctttacccggacactcggcgcggatgcgttgtaccagtttcagaatatccggcacgttttgcggatgcagcggatcgccgccggagagggaaataccctggcgtttgatacgagtgtcattcagatcgttaatgatctggtcttccattgctttggtaaatggctgaccggaatttacccgccatgtgcttttgttatagcaaccggggcattcatgaacacacccggagacaaacagggtgcaacgagtgccggggccgttgacgatgtcgacaggatagtactgatgataattcattatttcgcctggcttatcagtccgcgtgtaggctgcatccggtaatcaatgcctgatgcgacgctgtcgcgtcttatcagacctggagcaattgccaaatgtaggccggataaggcgtttacgccgcatccggcatttgcttagctcagagtgaagattaacctatctgcccattccccaaatgtttaacgcggcgcttaacttcttcctgcttaccagcgttaaacggacgtgcatccgggctacctaaatatccgcacacgcggcgagttacgctcacacgggaggcgtcatggttaccacatttcgggcaagtgaagcctttgctggtgcactcgaactcaccggtaaagccacactcgtagcactcatcaatcggtgtattggtgccgtaatacggtacatgctgatagctgtaatcccagacatcttccagcgccttcaggttgtgctgaatgtttggatactcgccgtagcaaatgaaaccaccgttcgccagcggcgggtaaggcgcttcaaagtcgatcttgtcgtacgggttcaccttcttctccacatcgaggtggaaactgttggtgtagtaacctttatcggtcacgcccggcaccacgccaaactcagcagtatcgagacggcagaagcgatcgcacaggttttcactcggcgtgctgtagagactgaaaccataacccgtttcttctttccactgatccactgcctgacgcagacgttcaacaatggcgatacctttcgcgcgaagctgctcgttgtcgtaaacatgctcgccgccgaacagcgcgttaatggtttcgtggatgccgatgtaacccaggctaatagacgcacgaccgtttttgaagatttcagaaacatcatcgtcagcattgagacgcacgccacaagcaccttccatatagaggatcggggccacgcgcgctttcacgccttcgagacgagcgatacgggtcatcagcgccttacgtgccagcaccagacgttcatccagcagcttccagaaggtggcttcatcgccttttgcttccagagcaatacgcggcaggttcaggctgatcacgccgaggttgttacgaccatcgtggatctgctcgccgttttcattttcccacacgccgaggaagctgcggcagcccatcggagttttaaagctaccggtgactttcactacctgatcgtagttcaggatatccggatacatgcgcttgcttgcgcactccagcgccagctgtttgatgtcgtagttcggatcgccttttttatggttcaggccatcgcgaatcgcaaacaccagtttcgggaacaccgcagttttacggtttttaccgaggcctgcgatacggttacgcaggatgctttcctgaatcaggcggctttcccagctggtgcccaggccaaaaccaaaggttacaaacggcgtctgaccgttggcggtgtgcagggtgtttacttcgtactccagactctggaaggcatcgtagcactctttgatggttcgagagttagcgtagccttcggcgtccgggatgttccactcttctgcggtcttgcgatgtttgttgtagctggcagtgacaaacggtgccagcacttcatcgatacggttaatggtggtgccgccataaatatggctggcaacctgagcaataatctgcgcagttaccgcggttgccgtagagatgctcttcggcggttcaatctcggcgttccccattttaaagccctgggtcagcatgcctttcaggtcgatcaacatgcagttgaacatcgggaagaacggactgtaatcgagatcgtgatagtgaatatcgccacgctcatgtgcctgcaccacgtcacgcggcagcaggtgctgacgtgcatagtgtttagccacgatcccggccagcaggtcgcgctgggttggaatcaccttgctgtctttgttggcgttttcgttgagtaagctggcgttggtctgctcgaccagaccacggatctcctggttcaggcgaccgcgtttttcacgttcaatgtcgcgatcgtgacggtactcgatgtaagcacgagccagttgtttgtatggaccactcatcagctgattttcaactgcggtctggatctcattgatatccacctggttgcggccctgcatctgctcgctgacaaccgcggcaacagtggcgcaataatcggcatcatcgacttccgctgctttagctgcacgcagaatcgcttctttgatgcgctcacttttaaacggcactttgcagccgtctcgtttcatcacatgcggtgtcatgatcgctccatatttttaagaacaggttatccacagaaattgggaaaggcgttttccggttttttcgtttcgttttccggtgctttccgcaatcgccatccgcttatccacaacgccgcacctttttcgtggggagctgtagtagcaattatagtcgattaatacaacatattgggttgggacgcattttaaagtctatatatagtgctttgcatcaaggatgtttgagctttttttgatgtagctcaaagtaaaaagcagagcgtacggatgacgggcgctacagcgatatgtaaattttttaatgaatttgctggttgaaaaatcaacaaaaacaacatactgacagacaaaaccccggaatgaccggcattaccggggcttagggaagatttacttctgtaaccaccagacagcctcaaaaggccgtaaattcatggcacagggttgtggactggcttcttcgtagttatgcatcacaagctgccagttgccgcgcatttgccctgcctgccagggttggatctcacggctaaggttggcaatgaccagcaaggtttgccccttccattcacggcgatagcaccacaatacagggctgtttggcagcagatcctggtaattgccccatgtcaggatggcttcctgcttacgcagtgcgattaacttttggtaggtgtaaaacacgctggaatcatcggccagcgcggcttctacgttgatttgttgatagttatcgcccaggccaatccacggttcgccagccgtaaacccggcattatcgccgttgctccattgcatgggcgtgcgactgttgtcacgggatttactggcgaggattgccaataactcgtcggcatcacgcccatcgttgcgcagctcggcaaacatattgaggctctctacgtcgcgatagtcagtaatgcgcgtgaaatgcgggttggtcatgccaatctcttcgccctggtagatatacggcgttccctgcatgccatgcagcaccatcgccagcatttttgccgcaggcacgcggtattcaccttcatcaccaaagcgagaaacaatgcgcggctgatcgtggttacaccagaacaaggcattccatgctacgttgtgcattccttgttgccagtggcggaacaatgttttcaacgccacaaagtcaggtttagccagcgtccatttttcaccaccgggataatcgaccttcaggtgatgaaaattaaaggtcatgctcaattcactgcctgtcagagccgcgtatcgctggcaatgctcaaggctggtggaggacatttcacctacggtcattaacccgcgtggcgtaaacacatcgcggttcatctcgtgcaaaaactcgtgtgctcgtggcccgtcggtgtagaagcgacgcccgtcgccgtccaggtcttcagggaaacgcgggtctttggagatcagattcaccacatccaggcgcaacccgtcgaccccacgatcggcccagaactcacagacttttttcagctctgcgcgtaccgctggattctcccagttgagatccgcctgttctggtgcaaagagatgcaaatagtactgttcgctttccgcatgccagcgccacgcactaccgccaaatttactacgccagttgttcggtggcgtttctggttctccatcgcgccagatataaaactggcggtaagggctttctttgttcagcgcctcgcgaaaccaggcatgttgggtagaggtatggttaaacaccatatcgagaatgatacgaatcccgcggctttttgcctgcgtcaccagttcgtcaaaatcgtccagcgtgccgtaggtgggatcaatcgccgtatagttcgctacgtcgtaaccgttatcgacctggggagagacataaaagggggttagccagatggcatcaacgcccagtttatgcagatagtccaggtgttggataacgccacgtaaatcgccggtaccgctacccgtggtgtcctgaaaactctttggataaatctggtagataacgccgttttgccaccagtggggaagatgagtcattacgttattcctgcgaatgcgagggggcgcaattgcgccccgaagaaaattaaacaatgtccagcgtgcccaggcggtatttccgctgatagataaagctggtgagtacaatcgggatgatgatggcgatagccattgccagcgcaaacacctgccagtagctcggttgaatgctgagaattcccggcaggccgcctacgccgatgccattcgccataacgccgttcaggccgcatagcaatcctgccagaccagaaccaatcatcgcgcacagcatcgggaagcgatatttcaggttgatgccgtacattgcaggctcagtgaccccaagccaggcggagatagcggcaggcacggagatctcgcgttcattgtgcttgcggctggaaatgataatgcctatcacggcggagccctgagcgatattgctcagcgcaatcagcggccacactggcgtaccacccatgctttgaatcatctgcaaatcaatagcaagcgtggtctggtgtacaccggtgatcaccagcggggcgtacaggaagccaaacaatgctgcgccaatcggagcaaagctgccggtcatcaggtgacgtaccgcaaaggcaacgccatcgccaatcatgcgaccaaacggaccaatcagcgcatgggcgaggaacaccgcgaggatcaggctacagacgggtaccaccaccagatagaggtaatccggcacgatgcgtttaaggcgagtttcaataacgcccagcgccagtccggctaacagtgccgggatcacctgcgcctgatagcctactttggcgatgctgaacatgccaaagtcccacacttccggcagctgctgcccgagcagataagcgttcatcagctgtggagaaaccagtgtcacgccaagcacgataccaaggatcggcgtgccgcccatttttttcaccgcactccagcaaataccgaccggcaggtagaagaagatcgcttcaccgatcaaccacagaaaatcgtagatcgtttgcagggaagggtacatttgcgccagcgtctgaccgttgctcatgggcaaatcgccgatcacattgcgaaaaccgaggatcaaaccgccgctaatcaacgcgggcagcaacgggaagaagatcaccgcgaaatgagagatcaactgctcatgccatttcatattatgccgggcggctttttttacctgctctttatcaacctgcgcctgtccggtactcgcaatcagtgcttgatagtaatcacccacgttggtgccaatcaccacctgaaattgcccggcattggtgaaacagcctttcaccatagggagttgctcaatttctttcggtctggcattggccggttggttgaggacaaagcgtaggcgagtaatacagtggctcaccgtcgcaatattgccgcgcccgccgaccagttcaatcaaccgatcgatatccgtttggtttattttgctcatcataaagccccatggcagatgacatttttggttggctgcagaatatattgcgcggaaaaatttaaaaacgggaacgttcccgaaacgcagcgaagatcacaatttatcgttcaggaaacgatcaggacagggtggcggggatgatgatttgttgcggttcgctgcgcccggttacctgcgcgatcaactggcaagccgcctggcgtccagcttcggcgtaaccgggatctacggttacgatctccggatggaggaatttcattaacggcgtattaccgacgctcgccagttgcaaggtgtcgatgcgttgctcttgcaggtatttacttgcgccaagtgccagcgtgtcggttgcgcacagtaaggcggtagtttcaggcgtaatcacttttgcaacgttctcatagccttgcttcatagcaagccctggcagggcggcaacgggatgcagtttatgcgctttgcagaacgccaggtaggcttcgtgacgtcgcttaccggttgtcacgtcactgtgcggcacgccgagataactgatattacgatgcccctggtcatacagccgttgcatcaggattttgattgccccttcgtcgtcataacagacgctagcaaagccttttgcgtcacgcgccagcagaaccaggctactctgccagtgggctaacatttcttctgttatgccagtaaaaccgaacagcactacgccgtcgatattacgccgtttcagcactcccaaatgttcggcaactaattgcggggaaaactgactttccatcatgattgggtcgtaaccttgttcatagaacgctggcagcatggtttgaacggcgagattttcactcaagctatccagacgggtaacaatgatggcgaccactttatcgctttgcccacgcatagcgcgcgcagagcgggaaggggaaaatccatgctgattcatcactgcttcaacacgctcgcgggtgagctggctcacgccgctttcgttattcagcacccgggaaactgtagatttccccacgccgcttaagcgcgcgatatctttgatggtcagccgattttgcatcctgttgtcctgtaacgtgttgtttaattatttgagcctaacgttacccgtgcattcagcaatgggtaaagtctggtttatcgttggtttagttgtcagcaggtattatatcgccatagatgctacgaatattattggattctccttattatttgcggcgcttttttcacttaccggaggttatatggaacctgatcccacgcctctccctcgacggagattaaaacttttccggtaagcccgtcttttcacggcgttaccggatgcgtaaggccgtgacgttttaacgtccctgctcagctttattaccttcaggtaaggcttcgccacgcctgaagacatttctgtactgtttcagacagtgcggagggactccttatgtttaaagaaatttttacccggctcattcgccatttaccttcccgtctggttcatcgtgatccattgcctggcgcgcagcagacagtgaatacggtggtcccgccgtccttaagtgcgcattgcctgaaaatggcggtgatgcccgaagaagaattgtggaaaacgttcgacacccatccggaagggttaaatcaggcggaagtggaatctgcccgcgaacaacatggtgaaaataaattacccgcacaacaaccgagcccgtggtgggtacatttatgggtctgctatcgcaacccctttaatattttactcaccattctcggcgctatttcttacgccacggaagatttatttgctgcgggcgttatcgcgctaatggtcgctatttctacgttgctgaactttattcaggaagcacgttccactaaagcggcagatgccctgaaagcgatggtcagcaatactgcgacggtgctgcgcgtaattaacgacaaaggcgaaaatggctggctggagatcccgatcgaccagctggtgcccggcgatattataaaactggcggcgggagatatgatcccggcagatttacgtatcttgcaggcgcgggatctgttcgtcgctcaggcgagcttaaccggtgagtctctgcccgtagaaaaagccgctaccactcgccagccggagcacagcaatccgctggagtgcgacacgctgtgttttatgggcaccaccgtggtgagcggcacggcacaagcaatggtgattgctacaggtgccaatacctggtttggtcaactggcggggcgtgttagtgagcaggaaagcgagccgaatgcctttcagcaagggatcagccgcgtcagtatgctgctgattcgctttatgctggtgatggcaccggtggtgctgttaatcaatggttacaccaaaggcgactggtgggaagcggcgctgtttgcgcttagcgtcgcggtaggcctaacgccggaaatgttgccgatgattgttaccagcacgctggcgcgcggcgcagtaaagctgagcaaacagaaagtgatcgtcaaacatctggatgctattcagaactttggcgcaatggatattctgtgcactgataaaaccggcaccctgacgcaggataaaattgtgctggagaatcataccgatatctccggtaaaaccagcgaacgcgtgctgcatagcgcgtggttgaacagtcattatcagaccggacttaaaaacctgctcgatacagcggtgctcgaaggtacggatgaagagagtgcgcgcagcctggccagtcgttggcaaaaaattgatgagattccgtttgatttcgagcgtcgccggatgagcgtggtagtggcagaaaataccgagcaccatcagctggtttgcaaaggtgcattgcaggaaatcctcaatgtgtgtagccaggtgcgtcacaatggcgagattgtgccgctcgatgacatcatgctgcgtaagattaagcgggttactgatacgctgaatcgtcaggggctgcgcgtggttgcggtggcgacgaaatacctgccagcgcgtgaaggagattaccagcgggcggatgaatccgacctgatcctcgaaggatatattgcttttcttgatccgccaaaagagacaaccgctccggcactgaaggcattaaaagcgagtggaattaccgtaaaaatccttactggcgacagtgagttagttgcagcgaaagtgtgccatgaagtggggctggacgcgggagaggtggtcattggtagtgatattgaaacgctatctgacgacgaactggcaaatcttgcacagcgtaccacgctgtttgcccgcctgacgccgatgcataaagaacgcattgtgaccttactgaagcgcgaagggcatgtggttggctttatgggcgatggtattaatgatgcgcccgccttacgcgctgcggatatcggcatttctgtggacggcgcggtagatattgcccgtgaagcggctgatatcatcctgctggaaaaaagcctgatggtgctggaagagggggttattgagggacgtcgcactttcgccaacatgctgaaatacatcaaaatgacggcgagctctaacttcggtaatgtgttcagcgtgctggtagcgagtgctttcttgcccttcctgccgatgttgccgttacacttgcttattcagaacctgctgtacgatgtgagtcaggtggcgatcccgtttgataacgtcgacgacgagcaaattcaaaagccgcagcgttggaatccggcggatctggggcgctttatgatcttcttcggaccgatcagcagcatcttcgatattttgacgttttgcctgatgtggtgggtattccatgccaacacgccggaaacgcaaacgctgttccagagcggatggtttgtggtgggcttactgagccaaacgctgattgtgcatatgatccgcacccgccgtgtgccgtttattcagagctgtgcaagctggccgttaatgatcatgaccgtgatcgtgatgattgtcgggatcgcattgccgtttagtccgctggccagttatctgcaattacaggcgctgccgttaagctatttcccgtggctggttgcgattctggcagggtatatgacattaacccagttggtgaaagggttctatagccgtcgttacggctggcaataaagaataaactgggcacgatagccccgattcagattgtagacaaagtgagttttgttcatgccggatgcggcgtaaatgccttatccggccaacaaattcaataaattgcaggaatcacgtaggcctgataagcgtagcgcatcaggcgattttgcgtttgtcatcagacttaatccgggcatgatagcccggatttccatcaagattagcgacgaacagcgatcgcttcgatctcaatcttcacgtctttcggcagacgggcaacttcaacgcaagaacgtgccgggaaggtggcgttgtgttcggtgaagaaggcttcgtaagtggcgtttacggttgcgaagtcgttcagatcttttacaaacacggtagttttaacgatgtcgcccactttcaggccagcggcttcgacgatcgcttttacgttatccaggctctgacgtgcctgtgcagcgacgtctgccggtacttcgcccgttttcggatttaccgggatctgaccggaggtgatgatcatattgcccagatcaacgccctgtacgtaaggaccgatagctgccggtgcattttccgtcgcgatagttttgctcatgatttctcctttattacagcggtaaaaagtctggctcattatagggagccagacttttattaccaaccgcaattaattggccagcaccacattatgggaaaactctttttcacagtatttgcatttgagcgcgatatcattggcgcgttttcgcacggcaaagctggaactaaccggttcggcatggctgatacagttgctgttcgggcagaccagcacattgtcgatgcgctccggcagacttgggcggcttttacccaccacttcatagttgtcgatacggttaaccgtggcttgcggcgcatacaatgccagttgatctacttgatcttcactcaaaaaggtattttcgattttgatcagatctttgcggcccatctcgccagaaggcaggttcagaccaatggtgatgcgctgatccgtttcggtcagcttgaacagactcaacagcttaaaaccgatctgggcggggatatggtcaattaccgtgccgcgtttaatagcttcaacctgcaatttattatcgtgtgtcatctctatttccccttacagtaccagatcgcgattcagaaccagtgccagtaacgcctggcgagcgaaaatcccgttgcctgcctgctggaagtaccaggcgtgtggcgttttatcaacatccgtcgcaatctcatcaacacgcggcagcggatgcagcactttcatattggctttggcgttgtggagatcgctggcgcgaagaacaaactgcgctttcacgttggcgtactcggacgggtccagacgctctttttgcacgcgggtcatgtacaggatgtctacttccgccatcacttcttcaatagagctgtgcagactccatgcgatccctttttcatcgagcatatccagaatgtattgcggcattgccagcgcgtccggcgcgatgaagtaaaaacggttgccgtcgaacttcgctaacgcctgagtcagggagtgaacggtgcggccatatttcaggtcaccaaccattgcgacgtggagattgtccagacgcccctgggtttcctgaatagtgaataagtccagcaaggtttgcgtcggatgttggttggagccatcaccggcattcagtaccggtacattgccggaaaactcggtggccaggcgcgccgcaccttcctgcggatgacgcatcactatcgcatcgacgtaagtgctgataacgctaatggtatcggccagcgtttcgccctttttacccagacttgtattggcgctgtcggagaagcccaccacgctggcccccaggcggtgcatagatgtttcgaaagagaggcgggtacgggtagaggcttcgaagaaacagctggcaatgactttgtgcttcaacagctctggttgcgggtttgctttcagtttcgccgctgtcgccagcaccagattaaggtcatcgcgactaaggtcgtttatggaaatgatatgtttctgatatagcggattagccatcttttatctcctgacgcctgggcaaaaaaaagcccctcgattgaggggctgggaatgggtgatcaacgggaagaaaaacggcaggccagcgtcttttttcagacgcggtaagacaaaatgtcgaacacactgaaccatacatcctcccggcaaattgtccggcattatactcatcgtcagaagcggcgcaagcatttgatgcaatattttgtcagcgcaaacggtttatttgaattaaaagtcaaggtatatgcatttttatttgatgtgattctgcaggggaactgtccttcggtatcaataattgcagacattccctgctttttcctttttcactttcacgcaatcagatatgcattttattccattcatccgacttatagggcggagtgtgaaagcgaacggctaacactattgcttactgctcagggatgcgcgctatcactttaatttcaaaatcaaagcctgccagccatgtaacacccaccgccgtccagtttggataaggtggggcgctaaatatttcatttttcaccgtcatgatgtcttcaaattggttttctggatcggtatggaagctcgtaacatcaatgatatcgtcaaaagtgcatcccgcagctgccagggtcgcatgcaaattatcaaatgccagtctgacttgttgctgaaaatcgggttctggtgttccgtcctctcgacttcctacttgcccggaaacaaacagcaaatcgccggaacgaatagccgcagaataacgatgctcagcatatagactatgtcggccagcagggaaaacagcggttctttctaccatttggttatcctcaagatttacgacatgaacagaagatttctctttaccgggagccgcttttagcggacgacgtgagtaaacaaaacccagacatcatggataatggctgggcttaattgagcgtagtcggttatgcgccaaacgcgccatcaatggtatgcatcgcgccggtaacaaaactggcttctggccctgctaaccatgcgaccataccagcgacctcttccggttgcccatgtcttttgatagccatcaaactatgcaacatatcgcgcattggcccgttggcgggattagcgtcggtatcaattggccctggctggacgacgttaatggtgatcccacgcggtccaaaatcacgggccagcccgcgcgccatgccttgcagggcagatttgctggcggcataagcagccatgcctgcaacaggcatacgatcgccattcacggagccgatgattaagatgcgcccgccttcgggcatctgccgggcggcttcaacagaggcatgataaggagcatgaatattgattttgaaaaggcgatcaatatcgtcggcatttaattccagggcctcgccaaagacgccaatacctgcatttaccaccaggatatccaatgcgccgctcttacgaacgacatcaatgacagcgtctctgtcagcactatctgtgaatactgctgtcgctccagtctcttgtgccaggcgtttagcggcatctttgctccccgcataggtgaatcgtacattggccccatcggtgacgaaacgacgtacgatagcggcaccgataccacgactgccaccgaggatgagaactgtcttacctgtaaaagcgcccataaggactccttgatttattatgtaacatgcattacaaaactgttttaactttctgtcaacaggttttgtaatggtcactaaaaaacaatctcgcgttccaggtcgtcccagacgtttcgctcctgagcaggcaatctctgcggcaaaagtgctttttcaccaaaaaggtttcgatgctgtcagtgttgctgaagttactgattatcttggtattaaccccccgagcctctacgcggcttttggcagtaaagctgggttatttagccgtgtactcaatgaatacgtcggtacggaagctattccgcttgccgatattcttcgtgatgatcgtccggtaggcgagtgcctggttgaggtattaaaagaagcggcgcgcagatatagccaaaacggcggctgcgctggctgtatggttcttgaaggtattcatagtcatgatccacaagcgcgtgatattgccgttcaatattatcacgccgcagaaacgaccatttatgactacatcgccaggcggcatccacaacgcgcacaatgtgtgactgattttatgagtaccgtgatgtctgggctttctgcgaaggcacgagaggggcactctatagaacaactctgtgcaacagctgcaatggcgggggaagcgataaaaactattcttgaggagtgatgcgggccttgacccgaaaggcgggaaagcgcctgccgataagttgtgataagacaataattcacgcgttaaggctagcggaattgattatcttttcgtataacgatagaaatgaaacgttgttttaattaaggagtggaaaagatgatcatcggaaatattcataatcttcagccgtggctaccccaggagttacgccaggcgattgagcatatcaaagcacacgttacggcagaaacgccaaagggcaagcacgatatcgaaggcaatcgactgttttatcttatcagcgaagatatgaccgagccgtacgaagctcgccgtgcggagtaccatgcccgctatcttgacattcagattgtgttaaaaggtcaggaaggcatgaccttcagcacgcaacctgcaggcgcgccggataccgactggttagctgataaagacatcgcatttttgccggaaggcgttgatgagaaaacagttattctaaatgaaggtgattttgttgtgttttatccgggggaagtgcataaaccgctgtgcgcagtgggcgcgccagcccaggttcgcaaagcagtagtgaagatgctgatggcgtgatgacttttcgccgtaaataactcaaggtttacggcgagtttgtgaaaagagcgttttttgatatttttttgtgagtaaaatttgtaatgcttagacgttcttattcactcaaggagttcgtcatgagcaaaataagtgatttaaattattctcaacacattacattagccgacaattttaaacaaaaaagtgaagttttaaatacctggcgtgttggaatgaatgattttgcccgtattgccggggggcaggataacagaaggaatattctttctcctggagcatttttagagtttttggcaaagatatttaccctgggttatgtggattttagcaaacgctccaacgaagcgggtagaaatatgatggctcatattaagtccagttcttattctaaagatactaatggcaatgaaaaaatgaagttttacatgaataatcctgtaggggaacgagcggatagtcccaaggtgattatagaaattagtctttccactatcactactatggggactcgtcaaggacatacagccattatatttccacaacctgatggtagcactaaccgttatgaagggaagtcctttgaaagaaaagatgagagtagtttacacctgattactaacaaggttctggcgtgttaccaaagtgaagctaacaagaaaatagcgcgtctattaaataataatcaggagttaaataatctacagaaattaaataatctacagaagttaaataatctactgaagttaaataatatacaggggttaaataatcctcaggagttaaataatccgcagaatttaaatgattctcaggagttaaataacagccaggaattaaatagtccacaggagttaaatgatccgcaggagttaaataattctcaggacttaaataactctaaggtgagttgtacagttagtgttgattctacgattacgggtttattaaaagaaccattgaataatgcattattagcaataaggaacgaacatctgctattaatgcctcatgtatgtgatgaaagcattagttacttactgggcgaaaaaggtatacttgaagaaatagataagctctacgcattaaatgatcacggaattgataatgacaaagtaggtaacaatgaaattaatgacatcaaagttaacctgtctcatattcttattgattccttagatgatgcaaaggttaaccttacaccggtcatcgatagcattctggagacttttagtaaatccccatatattaatgatgtaagaatactggattggtgttttaataaaagcatgcaatattttgatgatactaaaaagataaagcatgcatgctccgtaataaatcatattaatcttcgcagcgatcagtctaaaatagctgagacattatttttcaatctcgataaagaaccctataaaaatagccctgaattacaggggttgatttggaataagttggttgtatatgtcaatgaatttaacttaagtaatcgagaaaaaacaaatttaatacaaaggctatttgataatgttgagtctatatttaatgaagtacctgtcagcattttagtgaatgatatttttatgaatgatttctttatgaaaaatcctgagatgattaattggtacttccctcagttacttaagagttatgagggtgaaaagatttattttgataatttaaaatatgatttaaatgataatgataaggaatctaataaagaaattttgaagaatcaaccagataatgttatcaaagaaaaactgaataatgaatacaaacttagatttagaatgatgcaaactatcttgcaaagcagagttaatgtattaccatatattaatgaacagcgtttaaataaactaaatccaccggaaaatttacgtatagcaatagaacactttgggtggaagaatagacctatcactgcataaaataatgtgatgccgggatggtttgtatttcccggcatctttatagcgatagcaattatttactgagcgtcgcgaccatcaccgctttgatagtatgcatacggttttccgcctgatcaaaaacaatgctggcggcagattcgaagacctcatcagtgacttccataccgccatgtaggccaaattcttccgccattttcttgccaagcgtcgtttggtcgtcatgaaacgcgggcaggcagtggaggaatttgacctccgggttaccggtcaactgcatcatcttgctgttcacctgatattcacgcagcaatgcaatccgttccgcccatttctcttttgcttcccccatgctcacccacacatcggtatagataaagtcagcaccttcaactcccttcgcgacatcttcagtcagcgtaatattcccaccattttgctgtgccagggcgcggcattccgtaaccagcgcagcttccggccagcacgcttgtggcgcgaccagacgcaaatccagaccggtaagcgccgcagcttcgagcatgctattgcccatgttgttacgcgcgtcacctgcatagaccagcgtcatttcgttgaacgctttgccgggcaaatgctcctgcatggtgagaagatccgccagcagctgcgtgggatggaactcattggtcaggccattccataccggcacgctagcgtattccgccagtgtttcgacaatctcctgaccatagccgcgatactgaataccgtcatacatgcgaccaagcacgcgggcagtgtctttaatgctctctttatgaccaatctggctgccgcttgggccgagataagtaacgcgagcaccctggtcatatgcggcaacttcgaaagagcatcgggtacgagtgctgtctttttcgaagatgagcgcgatgtttttaccagtgagtttggcttcttctttaccgcttttcttatcggctttcagcttcgcggctaactgcagcaggctgttgagttcagctggcgtgaaatcgagtaatttcaggaaatgcttatgataaaacccggacatagatccctcctgtggctaacgcctcaatgaattaaaattcaatttatatggatgattattcatttgcaagtctaaagcataaatctttgtcacaaaggtggaggcaatgtcagtggtgtgtgacaataagagtatcggcaggacattaagaggaatgagccatggcaaacccggaacaactggaagaacagcgtgaagaaacacgtttgattattgaagaattactggaagatggcagcgatccggacgcgctgtacaccatcgaacaccatctttccgcagacgatctggaaaccctggaaaaagcagcagttgaagcgtttaaactcggttacgaagtgaccgatccagaagagctggaagttgaagatggtgatatcgtgatttgctgcgacatcctcagcgagtgcgcgttgaatgccgatctgatcgatgcccaggttgaacaactgatgacgctggcagagaaatttgacgttgagtacgacggatggggcacttactttgaagatcctaacggcgaagatggcgacgatgaagattttgtcgatgaagacgatgacggagttcgccactaattaagcgtagcgcatcaggcccaggtagttcctgcaacctggtgaatttgtagcccggataaggcattcatgtcacatccggcataaacaaaacgtacgttgttaatgttcgaatgcccgcgagttgaacacgcgggcatttttttagagttcgcgcaacatccgcacttcacaatcgacatggcccgtgcagccaagcgcatagtcgatatgctcaaagcccaaatgctcataaagcgcaatggcttcctttaaaaaagcggtcgtttccagatagcagcgtttgaaacccatctctcgcgcctgctccatcgccattaaggccagtttttttgccagccctttgccgcggatagccggaagaaaatacatcttttgcagttcgcaaatatcgctctcactcccggttaatggcgctatcccaccgccgccgaccacttcaccctcgtactcaacgacccaatatgcatggccaggctgactatatacttgatacagctcgtcaagattcggatcggcgacggtgtagcctttatcagcggtaagaccgtattcggcggatacctgacgaatgacgcgggcgatagcaggattatcctgcagcgtcaggcgacgcattacaggactttgcggcgcaatgttattcatagtttaacccaataaaaataaagtaattatacatttgtttaataccactctcttcttacgtacgcaagcgacttataaagtaataaagtttttgccagcctattactgataagagtattgtaacgtggcagaacattttactgtctgtatatataagttatatcaatggattttttaattcagggaatttttatggctcaagttattaatgaaatggatgttccgtcccatagctttgtttttcatggtacaggtgagaggtattttcttatttgtgtggtgaatgtgttgttaacgattataacgctaggtatctatttaccatgggcattaatgaaatgtaagcgttatctttatgctaatatggaagttaacggacaacgattttcttatggaattaccggtgggaatgtttttgttagttgtcttttttttgtttttttctatttcgcaatcttaatgacagtgagtgcagatatgccgcttgttggttgtgttttgactttgttactgttggttttgcttatatttatggcagcaaaaggactgcgtcatcaggccttaatgaccagtctcaacggcgtaagatttagttttaattgctctatgaaagggttctggtgggtgacctttttcttgccgattttaatggccattgggatggggactgttttctttatcagcacaaagatgctacctgccaatagtagtagtagtgttattatatccatggttctgatggcaatagttggtattgtttccattggtatttttaatggtactttatatagtctggtaatgagttttctctggagtaataccagtttcggtatacatcgtttcaaggtgaaattagatactacgtattgtataaaatatgccattctcgcatttttagctttattgccttttctcgctgttgctggttatattatcttcgatcaaatattaaatgcgtatgatagttctgtatatgcaaatgatgacattgagaatttacagcaatttatggaaatgcaacgtaaaatgataatcgcgcagttaatctattattttgggattgctgttagcacaagttatttaacggtgtctttgcgaaaccattttatgagcaacctgagtctgaatgatgggcgtattcgttttcgcttaactttaacgtaccacggtatgctttatcgcatgtgtgcgttggtggtgatatccgggattacgggcggtctggcttatccactgctgaaaatatggatgattgactggcaggcaaaaaatacgtatttgctgggcgatttggatgaccttcctttaatcaataaagaagaacaaccagataaaggcttcttagccagtattagtcggggagttatgccttctttaccatttctgtaagagataaaaaaggccggagcatgctccggccttcgttttcatcactgtgttttgattacagcgcggcgataacagcctgctgttcaatcagtttcgctttcgcttccgcatagccttccagcttctcacgctctttcgcgatgaccgcttccggtgcgcgggcgacaaagccttcgttcgccagtttgttctcgatacggctgatttcaccttcaatcttcgccacttctttcgccagacgcgccagctcatcttctttgttgatgaggccagccatcgggatcagcagctctgcaccgtcgatgatcttcgtaacggaaaccggacctttgtcatcggcaggcagcacggtgatactttccagacgcgccagggtttgcaggaagccacggttttcatttacgcgacgttctgcatccgcgctgcaaccacgcagcagcagctccagcggtttgcccggcgcgatgttcatttctgcacggatgttacgtaccgcaacgatcgcctgtttcagccattcggtgtcggccagtgcggcttcatcaacctgagatgcatcgtactgcgggaacggctgcagcatgatggtgtcggcagtgataccgcaaagtactttcacacgctgccagatggtttcggtgatgaacggaatgatcggatgcgcgaggcgcagcagaccttccagtacagtcaccagcgtatggcgagtaccgcgcagttctgcttcggtgccaccgttcattaccggcttggtcagctcgagataccagtcacagaactggttccaggtgaactcatacagaatgcctgcggcgatatcgaagcggaagctgtccagcgcttcgcggtacgctttgatggtctggttgaactccgccagaatccagcggtccgccaggctcagcgtcatttcgccgccgttgaagccgcaatcctgaccttctgtgttcatcagcacaaagcggctggcgttccacagcttgttacagaagttacggtaaccttccagacgcttcatatcccagttgatgtcacgaccggtagacgccagcgccgccagggtgaagcgcagcgcgtcagtaccgtgcggctcaataccgttcgggaactgcttctcggtgcgcttacggattttgtccgccagctgcggctgcatcatattgccggtacgtttttccagcagttctggcaggctaataccgtcaaccatatccagtgggtcgataacgttacccttggatttggacatcttctggccttcgtcatcacgaatcaggccggtcatgtaaacggtgtggaacggcacctgcggtttgccattttcatctttgatgaagtgcatggtcatcatgatcatgcgggcaatccagaagaaaatgatgtcgaaaccagataccatcacgctggttgggtggaactgacgcagggcgtcggtattttccggccagccaagggtagagaaggtccacagcgcagaagagaaccaggtatcgagaacgtcttcgtcctgacgcaggacaacatcagcaccgaggttattttctttacgcacttcgtcttcgttgcggccaacataaacgttacccgcttcgtcataccatgccgggatacggtgaccccaccacaactgacgagagatacaccagtcctgaatatcgcgcatccaggagaagtacatgttttcgtactgcttcggtacgaactgaatgtcgccgttctcaaccgcttcaaccgccggtttcgccaggacatcggcacgcacgtaccactggtcggtcagcattggttcgataactacgccgccacggtcgccgtaaggaacggtcaggtcgtgcggtttaatttcttccagcaggccaagcgcgtcaactgcggcaacgactgctttacgtgcagcaaaacgctccagtttctggaactctgcagggatttcgctggaataaacgtcagattcgttacctttggtatcgaacacctgggcgctttcacggatatcgccgtcaaaggtcaggatgttgatcatcggcagggcgtgacgtttacccacttcatagtcgttaaagtcgtgcgccggagtgattttcacgcagccggtgcctttttccatgtcggcgtgttcgtcgccaacgatcggaatacgacggttaaccagcggcagaatgacatatttgccaatcagatctttgtaacgcggatcttccgggttaacggctacgccagtatcgcccagcagggtttctggacgggtagtcgcgaccaccagataatctttaccgtctgcggttttcgcaccgtcagccagcggatagcggatgtgccacatgctacctttgctttcgcggttttcgacttccaggtcagagatagcggtgcgcagtttcggatcccagtttaccaggcgtttgccacggtaaatcaggtcttctttatacagacgaacgaaaacttctttcaccgcattggacaggccttcgtccatggtgaagcgttcacgctcccagtcgacggagttgccgagacggcgcatctgacgggtaatggtgccgccagattccgctttccattcccagattttgtcgatgaaagcttcgcggccgtagtcgtgacgggttttaccttcttctgcggcaatcttgcgctcaacgaccatctgggtagcgatcccggcgtggtcagtaccgacctgccacagggtgtttttgccctgcatgcgctgatagcggatcatggtatccatgatggtttgctggaaggcgtgacccatatgcaaactgccggtgacgttcggcggcgggatcatgatgcagaaactttcctggctttcatcgccattaggcttaaagtagccctgcttttcccagtgctcgtaaagcggctgttcgatatcttgtgggttatatgtcttttccattatttccaggttgccgtattcaggttgaaaccagccacgcggtaggctttatagcgttcgcgcgccagttgtttcagagaatcttcataaggaacgaagtctaccacttctgtgaaagcggtggcaaaatctgcaaagcttgttcgcagactaatcaatatatcgcgccggctgctgctacgcttttgcggccaggcgatctccaccggtgcaccgccgcgcggtccttctcccgctaaattatgcggaacaaagctttctgccggacgcgcccacagggcttcatccagccggtaagcctgcttttcatcttcacaggcgatgagcacgcgcttaccgctgcgccaacgttctgcggcaatttcacacaccagttgctcaacggcgcttaagccatcgacggtggtgtcattgtccagaaggtagaacgtcgcgtttttcataaatggggcttcttgtggtggatttaaatacgcatcaggtatacaccgcagcgcctgatgcgacgctgttgtgtcttatcaggcctacgagttcagtgctgtgtaggtcggataaggcgttcacgccgcatccggcaataacagccttgcctgacgcaattactcttcgccgttaaacccagcgcggtttaacaggaactgtgccagcaacgctaccggacgaccggtggcgccttttgctttaccagaacgccaggcggtaccggcgatatccaggtgcgcccagttgtacttacgggtaaagcgactcaggaagcaacctgcggtaatcgccccaccaggacgaccgccaatgttcgccatatcggcaaaattggactccagttgttcctgatactcgtcacccagcggtaagcgccatgcgcggtcaccggattgttcagacgcggcaatcagttcatgggccagcggattatggttcgccatcagaccagtaatatgatgacccagcgcgatcacgcaggcaccggtcagcgtcgccacgtcaatcaccgcttccggctcaaaacgctcaacgtaagttaacacgtcgcacagtaccaggcggccttcagcgtcggtgttcagcacttcaacggtttgaccggacatggtggttaacacatcgcccggacgataggctcgtccgccaggcatgttttcgcagcctgccaacacgccgataacgttaatcggcagttgtagctccgcgaccatccgcatcacgccgtaaaccgctgccgcaccgcacatatcgtacttcatctcatccatgccttcactaggcttgatgctgataccgccggagtcgaaggttaaacctttacccaccagcacgattgggcgtgcatcttcgctcgcgttgcctttgtactcaatcacgctcatcaggctttcgttttggctaccctgaccgaccgccagataggaatgcatccccagctctttcatctgctgttcgccgataacgcgggtgatgacattcttgctgtagctgtcagccagctggcgcgcttgactagcgaggtaagcggcgttacagatattcggcggcatattgccgagatcttttgctgctttaatcccggcggcaatcgccagaccgtgctggatcgcgcgctcaccgctggtcagttcacggcgggtcggcacgttgaacaccatcttacgcagcggacgacgcggttcgctcttgttcgttttcagctgatcgaaactgtagagcgtctcttttgccgtctcgacagcctgacgcactttccagtagttgttacggcctttaacgtgcagctcagtcagaaagcagaccgcttccatactgccagtatcattcagcgtattaatggttttctgaataacctgcttgtactgacgctcatccagctcacgttctttgccgcaaccaataaggagaattcgctcggaaagtacattcggaacatggtgcagcaacaatgtctgccccggttttccttccagttcgccccgacgtagcagggcgctgatgtacccatcgctgattttatcgagctgttctgcaatcggagaaaggcgacgtggttcgaagacgcccacgacgatgcaggaactccgctgtttctccgggctaccgctttttacactaaactccatgcactacgctcctgaatcttaaagacaacggcggtggctacagatagaattgcaagctttcgtaactcatgtccgctgttgcgatgacttcgtgttaatcttaacgttattacggcattggcacgtcagaacaaaatctgagaggtgaatccgttgagtataattatcttagcgacgatttcgacgactcaagagaataaatgacgtttaagccatgaaacaagctaaaatcctgcaaaagacgagtttttacgggcgtatttaaagtgataatcataagatatctggtgcgggagacgctcaaaagccagctggcgatactcttcatcttgcttttgatcttcttctgtcaaaagttagtgaggatcctcggcgcagcggttgacggcgatattccggcgaatctggtgctctcccttctcgggttgggcgtgccggaaatggcgcagcttatcctgccattaagcctgttcctcgggctgctgatgacgctgggcaaactgtataccgaaagtgaaattacggtaatgcatgcctgcggcctgagcaaagcggttctggtgaaagcggcaatgatccttgcggtattcacggcaatcgtagcggcggttaacgtgatgtgggcgggaccgtggagtagccgtcatcaggatgaagtgttagcagaagcgaaagcgaaccctggcatggcggcgctggcgcaagggcaattccagcaagcgactaatggcagcagcgtgctgttcatcgaaagcgttgacggcagcgatttcaaagatgtgttcctcgcgcaaattcgaccaaaaggtaatgcacgtccttctgtggtggtggccgattccggacatttaacccagctgcgcgacggctcccaggtcgtcactctcaaccagggaacgcgcttcgaaggcactgcattgttacgtgatttccgcattacggacttccaggattatcaggcgatcattggtcaccaggcggtggcgctcgacccgaacgataccgaccagatggacatgcgcacattgtggaacactgacaccgatcgtgctcgcgcagaactgaactggcgtatcacgttggtattcaccgtgtttatgatggcacttatggtcgtaccgctgagcgtggttaacccacgtcagggacgcgtactgagcatgctgccagccatgctgctgtatctacttttcttcctgatccagacctccctgaaaagcaacggcggtaaaggtaagctggacccgacgctgtggatgtggaccgttaacctgatttatctggctttagcgattgttctcaacctttgggacaccgtgccggtccgccgcctgcgcgccagttttagccgtaaaggagcggtgtgatgcaaccttttggcgtacttgaccgctatatcggtaaaactattttcaccaccatcatgatgacactgttcatgctggtgagcctgagcggcattatcaagtttgtcgatcagctgaaaaaagccgggcaggggagttacgacgcgttaggcgcaggaatgtataccttgctgagcgtgccgaaagatgtgcagatcttcttcccgatggcggctctgcttggggcgttgcttggtcttgggatgctggcgcagcgcagcgaactggtggtgatgcaggcttctggttttacccgtatgcaggtggcgctgagcgtgatgaaaaccgccattccgctggtcttgctgacgatggcgattggcgaatgggtcgcgccgcagggcgagcagatggcgcgtaactaccgtgcgcaggcgatgtacggcggcagcttgctctctacccagcaaggcttatgggcgaaagatggcaacaacttcgtctacattgagcgggttaaaggtgacgaagagttaggtggcatcagcatttatgcctttaacgagaatcgtcgtctgcaatccgtacgctatgccgctactgcgaagtttgacccggaacataaagtctggcgtctgagccaggttgatgaatctgatctgaccaatccgaaacagattaccggtagccagacggtgagcggcacctggaaaaccaacctcacgccggacaaactgggcgtggtggcgctggacccggatgcactctctatcagcggtttgcacaactatgtgaagtatctgaagagcagcggtcaggatgccggacgttatcagctcaacatgtggagcaaaatcttccagccgctatctgtggcggtgatgatgctgatggcgctgagcttcatctttggcccactgcgtagcgtaccgatgggcgtgcgtgtggtcaccggtatcagtttcggttttgtcttctacgtactggaccagatcttcggcccgctgacgttggtttatggcatcccgccgatcatcggcgcactgttgccaagcgccagcttcttcttaatcagcctgtggctgttaatgagaaaaagctaaccgaatgaacgaataaagggagcgaaagctccctttattattgttagcaaagtgtgcttcgttcattcctgaaaaataattaaaattcaatatattgcagtggggtgggcatgataagacgcgccagcgtcgcatcaggcaaagacaaatctcgcctgacttaccttcttctcccccccagcaaactccccaacatcccgcgtacaatctgattcgtcacttggcgagcggcgcttttggccattgtttgcaccacaccatctttcttcccgccgcgtggtccggtagtgccgaacaaaatatccttcaatccaccaagaatgccgtcatccaccgctacctctttccctttcgcgggaggattattttgctgctcggtactggcctgaaagcctttttgcaacatctcataggcggattcccggtccacctcatcctcatatttgccatacaccggagagtgattaatcaagccattacgctcatcttccgtcaccggccccatccggctacaaggcgcgatcaccatcgcacgctccaccacagaagggcttcctttcgcatccagaaaagagatcaacgcctcgccggtgcccagttcctgaatcgccttttcggtatcaaacgccggattggcccgcatggtttgcgccgctgccttcactgctttctgatcttttggcgtaaaagcccgcaaagcatgttgaacgcgattaccgagctgcccgagcacattatccggaatatcagacgggttttggctaacgaaccagacgcccacgcctttactgcgaataagccttatcacctgctcaatcttatccagcagtacctgcggggcatcgttaaacagcagatgtgcctcgtcgaagaaaaacaccagttttggtttctccagatcgcccgcttccggcaattgttcatacaactcactaagcatccacagcaggctggcggcgtacagtttcggcatctgataaagtttctcggcgctgaggatattgataacgcctttaccgttggcatcggtgcgcatccagtctttgatatccagcatcggctcaccaaagaagtgtgctgcgccttgctgttccaggctcaacagcccgcgctggatggcaccaacgcttgcgctactgatattaccgtactgattctggaaggatttggcgttatcgccgatgtactgggtaattgcccgcagatctttaaagtcgagcagtaacagcccctgatcgtcagcaatgcggaagatgatattcagcacgccagattgcacatcgttgagattcaacagtcgtgccagcaacagcggccccagatcgctaaccgtcgcccgcaccggatggcctttctcgccaaagatatcccacaccaccaccggattggcatgcggttgccagtcattgacgccgatatttttaagccttgcgagcagtttttcgctcaccgttcctgcctgcgcgacgccggtcagatcgcctttcacatcagccataaacaccggcacgccgatttcgctcaaactctccgccagtttttgcagcgtaacggttttacccgtccccgttgcgccggtaatcagcccatgacggttagccattcccggcagtaaaaacagttctgtgtccggcgtgcgggcaattaacaggggttcactcatgagatatcctccagtttcctgcctggagtataggcaacgtccggcaaagagaatacgtgtaatgaagagaaaataacttaaagcgtgttgccgtgataaatctgatacccgaggtcaacagtgttgtggttgtgatcgttatttttaattttgctcagcaacatttgggcggccatccgaccaatatcaaaacggggagtaattacgctggcgaggcttgggatcatttgcctgccaatctccagcccatgaaaacccgcaatggaaatttgttctggcacggcgaggtttcgctcgcggcacagcagaagcgcacccatcgcaatatcgtcattggtgcaaaatacaccgtctaaatccgggtttgcgctaagggcatcacgcattaactgcattcctaaatgaatggaactgatggcgcgtggattcatgcgtaatggggaaagattatgcagcatcatcgcatcgcaatacccctgataacgctgttcatcgcgggtgtcatctttggaaccgagatacagaattttgtgcctgactcgcttctccagcatggtacacaccatgtcaaaagcggcctgccgattatcaaaaccgacctccatatccagccgttctccctgtacatccatcaattccacgaccggaatggtggcactacgcagaaatttcaccgtcctgatggtgtgatatttttcgctaagtataatcccgtcaatgttataagagagcaggttaatcacgctctcttcttcggaatcgcgatcgtaattgtaattagcaataagggtctgataattatgctcagaggtgacggattctattcccgcgagaatgtcagcgaagagttgattttgaaaactcggaatcaagataccgagggtataactttgtgcattcaacaacatgccgggagcgcgattagggatataattgatctcttccataattttggcgatgcgctcgcctgtttcctttgccacctttttcgggctgcggatataacgactcacggtcatttttgttacgccagccagcgtagcgatatcctgtaaagaaattctgtgattgcgcataacttctcccaacgtcgggggaatcttcaatcttcccccgaaactacatcacaatattttattctttcagtgcaatacggcgttaatggctaacacgcccagcaaacccataatagaaataagggtttccatcaccgtccaggtacgcaacgtttcaccaaccgtcagattaaaataccctttaaatagccagaagccagggtcgtttacgtgactcgcgatcacgctgcccgcaccggttgccagtaccattaaagcgggatcggcatgggtaacgttgataatcggcaacaccacacccgcggtggtaatggccgcgacggtggcagagcccagagcgatacgcaacagcgccgcaacagtccagcacatcaataacgggctaagtgtagttccggtcattaagtgactaatatagtgcccgacaccgctatctactaatacctgcttaaacgcgccgccgccagcgataataaacacaatcatcgcgatagcgcctatagaatccccaatgatatccatgatttgctcgatggtgcgtccattacgtcggcccagtgtgaaaatcgcaataacaatggcaataaacagcgcaacggcagggttaccgacaaattcaaagaagaggcgcacggtgttagttttcggtaacgtaatttcacaaacggcggcgatagccatcaggatgaccgggatcacggcagcgaaaatactgttccagaaggagggcatctcctcttcgctaaacagatgaggattaaataagccttccggtggtgctttctcaaagcgagttagcagtttagaaaacagcggtcctgcgacaataactgtcggaatggtaatgataaatccatacagtaaagtcgttccgagattagcctcaaagatagtcgcgatggcagtaggccctggatgtggcggcagaaaacagtgggttacagagagcgctgctaccattggtacgccaacatacaacaggggtaatccactacttgctacgatggtaaataccaacggcaacagcaggacaaaacccacttcaaaaaacatggcgaggcccacaaccagaccggtgatcactagcgcccattgcacgcgttttttaccaaaagtagcaatcagcgtagtggcgatacgttgtgccgcacccgtatcagaaatcagcttgcctaacatggccccgaaaccgaggatcattgccagcccgccgagcgtgctgccgataccattttgtatagagtgcaggacggcctgtgcatccatcccttcggcaaatccgacgacggcagctaccagaacgagggcaataaagccgttaactttaaagccgatcatcaggataagaagcagcgcgacgcctgccgcaataatgattaatggcatagtctttatctcttattagtgccagaaaagcagcgctttcgcgctgcacgtaggggggctgttaaacagccactaacatgccgccatcaacaaacaacaggtggccgtttacgaaatcagaggctttactagaaaggaacaccgcagcaccaatcagttcctgcggatctccccagcgtgcggcgggggtccgtttgcacaaccaggcggtgaaggcttcgtcctcaaccagtgctttagtcatttctgttttgaaatagcccggcgcaataccgttgacctgaatattgtggcgcgccagctcgacgcacatgccgcgggtgagcatttttaccgcccctttgcttgcggcataaggggtgatggtgtcacgtcccagttcgctttgcatgctgcaaatattaataactttacctgccttgcgttcaaccatgtgacgagttaccgcttggcttaccaggaacacggcggtctggtttactgcgatcacatcattccactcttgttcagggaactcagtaaaaggatgacggcgctggataccggcgttattcaccagcacatcaatggggccgatgtccttttcgatatgttcaacggcggcatcaatttcatgtttatgagtaacattaaaaggtgcggcaacggcctgaataccctcctggtggagtttttctacagcaagttctgcgcgttcggcagtaatatcattaataattatttgtgcgccatatttacccaggccggttgccagtaaaaagccaatgccctgtgcactaccggtaatcaagatattttttcctgccagactaaatagatcgttcattgtattattcctttatttatctcttagaaaacaagctggacttttgctgcctgggttttatcaccggcgaaacgtagcgcctcttccaggtcagtgaagggatattcagcactcagtaaaggcagtggattgataacgccattcgccagccaactcactgcggtattaaattcgctggtaaaacggaaagagcctctgagactaatctccttaccaatcaacgtcatcattgggaattctgccatcgcgcctcccatacctacctgcaccattacgccgcgtgcacgagtgacctccagacaggtattcacactactaggatgaccggacacttcaaagctgacatcgaaatagcctttttccgctttccagtgatccatgtcgtcgttttgtgggtttacgagcacatccgcccccatctctttgcccaggctaagggaacggggactcacatcagcacagacaatttccgcggcccccagtgttttcactgcactgacaatcaggcagccaatgggtccaacaccggaaataaatactcgcttgccctgtaactcgccggcctgatgtgcggcatgaatcgcgacggctaaaggttcggcaaaagccataaccttttcgtcagctttggccggataagggacacattggctcgtttcgaccattttataacgggtaaaaccaccatcaacatgagggaaatacatggcactgccaaaaaaacgcatatctgtacactgattctcgttatgttcaatgcagtatttgcagtgaccgcacggtttagacggattaatggctaccgtttgcccttcatgtaattcactactgtcgctatgaataactttaccgataacttcatgacctaacaccatcggtgcctttatcatgaaattacctacttttccttcctgataataatgtaaatcggaaccgcaaattccacctcgggttatttgtactaatgttccattattattccaatctatcgtctgctcggtaacggcaacagttttcttgcccgcaacaacgcaggactgtgttttcacttgcataaattcctcactggtcaggtagacacctcggaagcatttaagcggttttaactgtcattatttgtgatgaagatcacgtcagaaaattgttacattactatgttacgcataacgtgatgtgccttgtaattcttatcagtagaaataaaaaaacgtgaaattattatgccgccaggcgtagtatcgcagcaggtaagatgattcaggagattttaaatggcgggtgaaagctttattttgatgggcgttagtgggagtggtaaaacattaattggtagcaaggttgccgcgttattatctgctaaatttattgatggtgacgatcttcatccagccaaaaatatagataaaatgagccagggtattccattatctgatgaagatcgacttccctggctggaacgcttaaatgatgctagttacagtctttataaaaagaatgaaacaggatttattgtctgtagtagtttaaaaaaacagtatcgtgatattttacgcaagggtagcccccatgttcatttcctctggttagatggcgactatgaaactattctcgcgcgaatgcagcgtcgggctgggcattttatgccggtagcgttactaaaaagtcagtttgaggcactggagcgtccacaagcagatgaacaggatattgtgcgcattgatatcaaccatgatattgccaatgtcaccgaacaatgtcggcaggctgtgctggcgatacgacaaaacagaatatgtgcgaaagagggcagcgccagtgatcagcgctgcgaatgattttcaaaaatcggctttcaacaccacgcggtaacgcgccttaccgtcgcgcacatgctggatggcgtcgttaattttgctcatcgggaacagttcggtggtcggcgcaaccttgctgcgggcggcaaaacgcatcagcttacgcagctcataaggcgtgccggtagcagaaccagagacgctgcgatcgcccgcaattaacgtaaaggccggaacagacagcggcgtgagaaccgcaccgaccgtatggaaattaccgccataggtcagcgcctcaaaatagggctgccagtcgaggctgacgttgacggtgttgataatgagatcaaactgccccgccagtgctttcagtgcctgcggatcgcggctattcaccactttatcggcacccatcgccagcacttcctgctctttcgccggattagaactaaaggctgtcacctcgcatcccattgcgtgcagaagttttatagcgatatgccccagcccgccaataccaattaccccaacgcggctggtagcagtgatatggtgcatcaacagtggtttaaagaccgtgataccgccgcacaacagcggcccggcggactcgatatcaatattttctggcagtggaatcacccattgccagtccgcacgcaacttctcggcaaagccaccgcgattcataatcgtcggcaccgcaccttgctcgcagttgatctgattaccgctaatacaggcgtcgcagtgaccacagctacgcgccgtccagccaatcccgacacgctgaccgacctgcaaacctttatcctgcgcggcgctcccgagtgccaccacgcgcccaatcacctcatgcccggcaaccagcggatattgactaaatccccattcgttatcgatcatgctcagatcggaatggcagatcccgcagtaatccacctgcacttcaacatcttgtggcctcagctcaccgggatcgtactcataaacttccagttcgccgcccgcttcttttgcggcatagctttttatcatgctcattttttggtccttctctggtgttgtttgggaagtgtagagcatggcagggcggggtgcctggagtgtgacaaaggttacacatcgctgtatgcaatgctgaaaatttcagcacttagcgaggtgcgagcaagctggcgcttgcatggtggcgtgcgacaggtataatccacaacgttttccgcatacctcttcagtgccgaagtggcgaaatcggtagacgcagttgattcaaaatcaaccgtagaaatacgtgccggttcgagtccggccttcggcaccaaaagtatgtaaatagacctcaactgaggtctttttttatgcctgaaatccagtgtttatctatctttcccgctatattaactctctcaaggtcaaccgatatcaacgtacatctaccaacatatgttggtacagatgatggtatttccggttcgataatgcttgtaccaacagggagggaatacgagaaatcacaggacattgctaatgctggtacgcaatattacctgaagctaaaaacctgcacgttagccctttgtaggccagataagacgcgtcagcgtcgcatctggcataaacaaagcgcactttgctggtctgttcccctcaccctaaccctctccccggaggggcgaggggactgtccgggcacatttttagactttgtcatcagtctgagcctgccattggcaggctctggtgtccttttacgctaccatgctaataatcagcacaataatcagcccaaccacggagttgaccagctccagcagaccccaggttttcaacgtgtcttttacactcaggtcaaagtaacctttgaacaaccagaaagatgcatcgttaatgtgggtgagggtgttggaacccgcagccgtcgccagtaccagcagcgccggattcacgccaaccagctgaccagttgctggatctaggattgcagcactgataatcccggcggcggtcatcgcgctaacgacaccctgacccgtcgccagacgaattagcacagtgatcagccatgccatgatgtaggggctgatattgccgtgggacatcaacatgccgatggtgtcgccaatgccggtgtcgatgatggtctgcttcagcacgccacccgcaccgatgatcagaatcaccattgcaatactcttcaccgcgctttcaaaagcgttcatcacccactgcatgtcatgaccacgtgcggtgccaaagagtacgaatgcaaccaccatcgcaataaacattgcaatcgggctggaaccgataaagttaaccacttcccaggcaggggtatcttttaccagccagatattggcgatggtggtagagatcataatgatcgccgggatcagcggcaccagaatgctaacgccgaaagagggcagattattcatatctaccggttgatctgctttcaggaaacttggcgttgggcgctcaagattgccgaggaacttcggcaggatcagacctgcgcagattacacttgggatcgtcaccagtacgccatagatataaaccatccccatatccgcgccataagcattcaccagcgccaccggacccggctgcggtgggaacagactatgtgcggtagtggcagctgctactgccgggatcgccagtttcaggaacggaattttagcttcggcggcaataacaataaccagcggcgctaacatgataaaggccacttcatagaacatcgccagaccaaaaatcaggccgatgataatcacgctcagctgtacatagcgcagaccgagacgcgccagcagcgtatgcgctatctggtgagccgcgccggagtcgaccatcaatttaccgatgaccgcaccgaacaccacgatgatagccagttcccccagcgtgttgccgaagcccgctttcatagtgtgcagcaggctcatcaaatccatgcccgccagcatcccgacggacagcgccgccaccaacaaagccaccatactattgattttgaacttcaaattcagtaccagcatcagaccaatgccgaataccacccagagaatgttaagcacatgcataacgttttaccttacctggttgaaccgttgttattttgggcgatatgttatgtaaattggtcaaccattgttgcgatgaatgtcacatcctctgatcaataaccatcgattaccctttgctgcaatttgcagcaacaaccatgagagtgaaattcttgtgatgtggttaaccaatttcagaattcgggttgacatgtcttaccaaaaggtagaacttatacgccatctcatccgatgcaacgccacggctgcggtctggttgttcatccggatacctaaacaactccagggttccgcgtctctttgctgtggaacccactatgtgaaagaggaaaaatcatggaacagacctggcgctggtacggcccaaacgatccggtttctttagctgatgtccgtcaggcgggcgcaactggcgtggttaccgcgctgcaccatatcccgaacggcgaagtatggtccgttgaagagatcctcaaacgcaaggcgatcattgaagacgcaggcctggtgtggtctgtcgtagaaagcgtgccaattcacgaagatatcaaaacccacactggcaactatgagcagtggatcgctaactatcagcagactctgcgcaacctggcgcagtgtggcattcgcaccgtgtgctacaacttcatgccggtgctcgactggacccgtactgacctcgaatacgtgctgccagacggctccaaagctctgcgcttcgaccagatcgaattcgctgcattcgaaatgcatatcctgaaacgcccaggcgcggaagcggattacaccgaagaagaaattgctcaggcagctgaacgcttcgccactatgagcgatgaagacaaagcgcgtctgacccgtaacatcattgctggtcttccgggcgcggaagaaggctacaccctcgaccagttccgtaaacacctggagctgtacaaagatatcgacaaagcgaagctgcgcgaaaactttgccgtcttcctgaaagcgattattccagttgctgaagaagtcggcgtgcgtatggctgttcacccggacgatccgccgcgcccgatcctcggcctgccgcgcattgtttccaccattgaagatatgcagtggatggttgataccgtaaacagcatggcaaacggttttaccatgtgcaccggttcctacggcgtgcgtgctgacaacgatctggttgatatgatcaagcagttcggtccgcgtatttacttcacccatctgcgctccaccatgcgtgaagataacccgaaaaccttccacgaagcggcgcacctgaacggtgacgttgatatgtacgaagtggtgaaagcgattgttgaagaagaacaccgtcgtaaagcggaaggcaaagaagacctgatcccgatgcgtccggaccacggtcatcagatgctggacgacctgaagaagaaaaccaacccaggttactccgcaattggtcgtctgaaaggcctggccgaagttcgcggtgtcgaactggcgatccagcgcgctttctttagccgttaatatccaccggcatggctgcgcgccgtgccggttccttcttccttgccgtcactctttgaagacggattctggagtttacgatgactactattgttgacagcaatctgccggttgcccgcccgagttgggatcattctcgtctggaaagtcgcattgtgcatctcggttgcggggcgtttcaccgcgcgcaccaggcgctgtatacccatcatctgctggaaagcaccgacagcgactggggcatctgcgaagttaacctgatgccaggcaacgaccgcgtgctgatcgaaaacctgaaaaaacagcaactgctgtacaccgtagcggaaaaaggcgcagagagcaccgagctgaaaattatcggtagcatgaaagaagcgctgcatccggaaatcgatggctgcgaaggtattctcaacgcgatggcgcgtccgcaaacggcgattgtctctctaacggtcacggaaaaaggctactgcgctgatgcggcaagcggtcaactggatctcaataacccgctgatcaagcacgatctggaaaacccgactgcgccgaagtccgcgattggttacatcgtcgaagcgttgcgtctgcgtcgtgaaaaagggttgaaagcgtttacggtgatgtcctgcgataacgtgcgtgaaaacggtcatgtggcgaaggtcgcggtactggggctggctcaggcgcgtgacccgcagctggcggcatggattgaagaaaatgtcaccttcccgtgcaccatggttgaccgcatcgttccggcggcgacgccagaaaccttacaggaaattgctgaccagctgggtgtttacgacccgtgcgccattgcctgcgaaccgttccgtcagtgggtgattgaagataacttcgttaatggtcgcccggattgggataaagtgggcgcacagttcgttgcagacgttgtgccgttcgaaatgatgaagctgcgtatgctgaacggcagccactcttttctggcgtacctcggttacctcggcggctatgaaaccattgccgacaccgtgactaacccggcttatcgcaaagcggcctttgccctgatgatgcaggaacaagcgccaacgctgagcatgccggaaggtacagacctgaacgcctatgcgacgctgctgatcgagcgtttcagcaacccgtctctgcgtcaccgtacctggcagattgcgatggacggcagccagaagttaccgcagcgtctgctggacccggtgcgtctgcacctgcaaaacggcggcagctggcgtcacctggcgctgggcgtggctggctggatgcgttacacccagggcgtggatgagcagggtaatgccattgacgtggtcgacccgatgctggcggagttccagaagatcaacgcgcagtatcagggcgcagaccgcgtgaaagcgctgctgggcctgagcggtatttttgccgatgatctgccgcagaatgccgactttgttggcgcagtgacggcggcatatcagcagctgtgcgaacgcggtgcgcgcgagtgtgtggctgcgctgtaactaactgattaccctacagacttactggtcaatcaaactgatatttggttgaccagttttcgtttttttgcccacctgtacgtgccaacttccagtgctaatggtatagtttgagattaacgggggccgtaaaattgcccgttgtaggccggataaggcgttcacgccgcatccggcaaaaatttgattaaccgcacctaacggacacaacaccatgaaatctgccacctctgcgcaaagaccttaccaggaagtcggggcgatgatccgcgatctgatcataaagacgccgtacaatcctggcgaacggctgccgccggagcgtgaaattgcagaaatgcttgatgtcacgcggacggtggtacgtgaagcgctgatcatgctggagatcaaagggctggtggaagtacgccggggtgccggtatctatgttcttgataacagtggcagccagaacacagacagtccggatgccaacgtctgcaacgatgccggtccttttgagctgttacaggcgcggcagttattggagagcaacatcgccgagtttgccgctttgcaggctacccgcgaagatatcgtcaaaatgcgtcaggcattgcaactggaagagcgtgaactggcttccagtgcgccgggcagcagcgaaagcggtgacatgcagttccatctcgctattgccgaagcaacgcataacagcatgctggtggagctgttccgtcagtcctggcagtggcgggaaaacaatccaatgtggatccagttgcacagccatctggatgacagcctgtatcgcaaagagtggttgggcgatcacaaacagatcctcgccgcgttaatcaaaaaagatgcccgagcggcgaagctggcaatgtggcagcatctggaaaacgttaagcaacgtctgctggaattcagcaacgttgacgatatttattttgatggctatctgtttgatagttggccgctggataaagtcgacgcctgacttattataataagcgcaagggtaaacgttccttgcgctttcttaaattaagaagtcgcaatgagtattactttgtaaattgcagggtattgtttagctatctgtataacctgaatgttagtactcattcttcctggtagtaaggcgagattattaaagttgccatgcagcgtccggggaagtgttgggcgctgttttttttgtttcttaataatgtgttgtaagccgtagaaggcgtgtaggtcgcaccctatgcgacctacacatcagtcaggaattacccttcacgttctaccactttaatttccaccatgccgatcccgagcttacgcgggctgtgtccgaggatattcccttcgttggtactgacaggttccggcggcacaattaccagtgtgtcggcatcggttgggttatcgaaatgcagtgtggtggtggtcacttcattgcccagcacaagagtttgttcttcattgcctacgcgtaccggaataggacggctggcgttattgccgtatgctttggcggtaatcaccaggtcaaatttcttcggcagcggatgcttgtactcgatttttacttcatcgcccagctgcgcgttggaccagcggccccagctctccggacgggaaatcccgctaaactgtttcacctcttctggcgcaccggcgacgttaaagatgaaactgtcggctttgtagcgaatatcgttatcaacaatcttcagcgtatcgacattgcctttgtaacgcgccatgtcgatgaccgtatctttaaatgccgttttgccctgccatgttgttttgtcaacatgctgaacaatttgctgaccgccaagctgcccttggctgacacaccagtcggtggaaagtgccagttccggagcccagagttgtgccatcttgtagcaacggtcaacccagacgaaattgtcgcgtggagcgaaatcggccagctggaaacgcagcggtgcactgtattcgctttccggcagcggttccacgcgtttgtcactaacccgcaacagcagcggcaaacggaaatggctaccgctgaaggcaatcatgtttttctgctggtcgatggtgaactctttcatctctttagggaatttccacaggcggatgatatctggcttccacgccaatgttttctctttgatattgaggaagatttcgctcatgctctgcccggataaactgctacgaccaagtccgagatagttatcgccaccgagaatgtccagcaccgtcgcgccgttatccatcgtgttacgcttcactgccagcgtctcttgctgcggcttgtcgccacgaatgacaaaaaacaggttattgcgatcctgcttattgaggtatttccacgccgtgttgttcatcgctaaatggtcagaagagacgacgatgacggtatctttaaaccacggactcgctttgattttgttgataaacgtcgcgatgttctcctggctgcaacttaccgcgctgaaactctgattcggtttaccgtcaaaatcatattttttgcggttacaggtacgagagataaaaccatccgggtgatgggtatcgactgtcagggtaaacagactgaatcgctgaccactgcgggaaagctcttcaaactttttccacgcttcatcgagaacggtatcgtcgtagaatccccagtcgttgcgatagtgcgggtcggctaccacgcttttcagctcttcactgccgtataagtggtcgaagccatggctcttcaggaacacatctttaccggcaaaacgcagattcgcgccctgcacgaaatagttctgataaccgctgtttttcaggatatctcccagacagatgttctgcgggaagaagctggagacagaggcggaggcgttgccttcaaagggggcaaacagcggtatgccgcactgagaagccaccatgcccgcaatcgtgtaatctgttcccggcagctgctgcgtgtggctgaaatccaggccttcatttttcaacgcgcccagttcaggcgtgagatccgggaaagcctcgttatcaaaataggtccgctcgagactttcgccgtagatataaaccaggttgagtttcgggtcagggatagttttgctcggctctttataataagccgcaaagtccgggtcgccgtcgcgactctgggatttcaccagttccgttatctgacgaaatgccgggctggcgtccacgctacccagcgccagtaagagcgccagcaggctgtaaccaaaatggtgcggatgatggcgacgacggcgcaggatccagcccagcgcaccgaacaccgctgtcagccccagcacaatgccgatacccggcaaaatgtatttgctgacgccagcaccggtcaggctgttggttaaggtatagagaaccgcgtcgttaataccatcgccagtaaaatagtcgctggcaaacagggtgatatttaaaacgacaaatagccccagcaccgttaacgtggctgcaaaccaccaggtgttacgtcccgctttccatgcgtaaatcagcacagaggcgagaaaaagggcgaaagagagtagttcactcaacgggcgatcctcactaaaccgggccgtttagccaacgtttaagctttttgagaagcacaatgtaatggcgtcgccatattgctgcaattctagtgtcaaaaaaatgcgatgttgttaggaattagtttataaacagacttttttgattacggtcacttcccgtgtaacaggggtaaaaccgtccaggagcagggaaaagggcaggagagagccgcgtcagccgggtaacagctaaaacgcggcgtttcgcggttcaggaaatgaagttcagcccctgttttaacaccagatcgcaggctttggttttcaccttttctgccagcggagttgttccgatgttatccagattgagttgctgaccatctttggttttcagcaaaccctgaatgccgtccagatagttggtgtcttctttttgctcttcactgttcaggcccagcttttccagcacctggttcttgatgttttcggcatcggttacgctcgccagcttttgcttcgcgcagtattgcagaatgcctgcggcattgttcatgttatctgcgcttaaggcctggtttccgctgctaagcaagttagttaaactcgcgaggctccaaccgccttcctgtgtcgtgctgttttggttgccaagttcgctggcggcgctggagagcgcatctttccaggacgcagcatgcaccccggtggaaattaatgcgctggcggcaatggcacagcacagaagatgtttaacagttttcatcatcattactcaaggtggaattgtgtcgcagtataccgccagaaacggggattaatactctttacctgttacccggctacggtagctatcccagttgaagatcacccacaaactgttacccaggcgcatacggtccatcacgcgttcgcccagcaacttggtcatctcttccatattactgttggtcagcatcccggttgggcgtttggaagaagagcggcgatcgacgatctggttgatgatcactttttcgtatttgctttcggtctgcacgccgatctcatcgatcaccagcagatcaacgttgctcagatcgttaagcagttgttcttcgctggtaccgctattcctgaaggtatctttcatcgcgctcataatatcggccacggtgatgatcaatacggatttaccgcgtagcagcagctcgttgcagattgccgccgccagatggtttttgccggttcctggcttaccagaaaagatgaagctggcgatgttgccgtcaaactcttcgacatactggcgcgctttgcttaacgcattcatctgcccttcacactcaacgcgatagttctcaaaggaacagttctgatgcagtggacgaataccggagcggttaaaggtgcgctgcattttcatcgcccgattttcacgttcgagagcggcggagcggatcgctccttgttctttttgccaggccagtagttcttcacccgttttgaatgcgggtttgatatgggcaggcatcattttttgcaggcgttgcatcaggtcgccaacgtttttcatcgttaccctctgaatcctggtggaatttggctgtcaggttcgctgaccgtattcacatctcgtttcggcagtccgccgttgctggcacgaccgatttgcaggctgcgcgccagtttttgttgccactgcacatggtgaaagactttaccttccgcctgccagtaggcaatgaaactggccagttcttcggtggtcaccggctctcttagcgccacgccccatagcgccgccaggcggataaaatcggcatcgggttgccagtccggatacatggcgaatttccccatgggtacagcaacgggagcggcttgcggttcctgatagagttgatcgtccagagcgacatcgcttcccggacgcgccagcttttcttccagcgccagcagttcagccaggcgtgcaggcgtgacggcataaaacgccggggcattgttagcaaatacggcaaccacaccgccttcagcttttgccagaacggtttggtgatcgtgtaccagggcgtcaataccaacgacgtccggggtcaaaactctggaagacatactgtttctcaaatatggaacgatgaacgagaagggagataacttttatagtaacacacggaggagaggaggctgtctctcatccgtgtgcttaagcgaggcaattttatacgcgagggcgcttgcggtacaaccataatccaggaatggaaagaccgatggataacgcaccaacaatgctactagctgtaagaaagttggttaacagggtaatcatcaacggttcgctgtaacctaactggctgatttttaccgcgctaatcattgcggtataagcgcttatgcccgggaacatagggataacggccgccacggtaaacactttcggatgcgccagataccagcggctccattgaataccaatggtaccgaccagcatagaagccataaaggtactccactcaatattcaacccgctggtcatcaagatcattcgggaaccatgacctatcgagccaagcagcgcacaccagcgtaacgcccgcacgggaacgttgaacaccatcgcaaagccgaccgcaggaatggcggcgaggatcatatcctgcgccaacgctaacagaaattcgatcacacccatccgcgtagcccccaaatcgtcagtgccatcactacgccgacgcaggtagccagtgtcagcagactggcgatcgcccagcgtgccagtccggtattgatgtggcctttaaacatatcggcgacggcattaatcaacggaaagcccggcactagcagcagaacgctggcggccatcgcaatggtgggggtattgctgaaagtggggagttgcaaaagcaatccggaaatggtggtggcggcgaaagcggtaaggcaaaagttgatctgtggatgaagatgacgttgtgccagcagctggcggatatacatcgcggtcgtactggcaaagaaggtgatgacggcaccatcccagccaccgttattgagtttacagaaacaggcgcaagaaaggccaaccattaaggctaccagccatcttgggtaacgtaatggctgaatttggctaaatcgtttctctacgcctttgtaatccagcagatgatgctccgcaagaatcacaatgtgctggacttcagtcaccacatgcatattaatgccgcgatcgtgatttttacgtgtgcttgtcaggcattgcccatctttaatagttgtcagcactatggcgttgctagagatagaactttcgacgctgtccattcccagtgcccgacccagtcgactggaaagctcatcaaccaacgcgctttccgcaccatgttgcaaaagaaataatccacactggatacaaagccgtgttacggctcgctgttgctcagtttgcataactcgccctttgtcatagacgtgctgcgtattgttcagataatgagaatccatttgtatcatgaagcacggttgttttgcggtaggttaagatcaaaattgcgctgattaatcctggttatcgggagaagctcggtgataaaaagcgaattatctctcgccgcaaacaaactatcacatgaatattatcatcataatgaatttattgtttggcctttacgaatcaggataatagataaccgggcacgttttttaatgttaacaagctaaaaccatcagatttcattgaataaatattggttgtgtgattttgcattctgcgggaagggatatcatttaattataaattaaatgaatgtgatttctgtttttcattaagtattcctaacaacttaatgtagatattttaaatgtctccaggctatttcaccaggttatcatttgatgctaaccttctgacacatgcagtggagttgttgtgcagcaggagtatgctgatatgaaagtgaatgctaaggataatttattcgcttaatctattaatttgctggaaacatttaaggaatgaatatcctgaataaaccatcataatttttagacagtggatgtggaggaaatatgttgccaggatgctgcaaaaatggaattgttatcagtaaaatacctgttatgcaagcagggttaaaagaggtcatgaggactcacttccctgaatatgaaataatatccagcgcctctgcggaggaccttaccttattacaattacgtcgttccggattagtcattgctgatttagccggtgaaagtgaagatccacgttctgtttgtgaacattattattctttaatcagtcaatatcgggaaattcactgggttttcatggtgagtcgctcctggtattcccaggcagtagaactgctcatgtgccctacggcgacgttattgtctgatgttgaacccattgagaatctggtcaagaccgtacgttccggcaatacgcacgcagagcgtatcagcgccatgctgacctccccggcaatgactgaaactcatgattttagctatcgctccgtcattctcactcttagtgagcgcaaggtactgcggctattaggtaaaggatggggcatcaaccagatagctagtttgcttaagaaaagtaataaaactatcagcgcccaaaaaaacagtgcgatgcgtcgactggcaattcacagcaacgctgaaatgtatgcatggataaatagcgcgcagggtgcaagagaacttaacttgccttctgtttatggagatgccgcagaatggaacacagccgaattaagaagagaaatgagccacagttaaaaaaatgcgtcatgagtagtatcggtattgagagtttattcagaaagtttgcgggtaacccttataagctccatacctataccagtcaggagagttttcaggatgccatgagccggatcagctttgcggcggtcattttttctttttctgccatgagaagtgagcgcagagagggattatcttgcctgactgaactggcgattaagtttccgcgtacccggcgtttagttattgcggatgatgatattgaagctcggctgattggtagtttgagcccaagtccgctggacggtgtattaagtaaagcgagtacgctggagatttttcatcaggaactctttttgagtttaaatggtgtacgtcaggcgaccgaccgactgaacaatcagtggtacattaaccaaagccggacgttaagcccgacggagagagaaatattgcgctttatgagccgtggctacagtatgacacaaattgccgagcagcttaaacgcaatatcaaaacgatccgtgcacataaatttaatgtgatgagcaaactgggcgtcagttctgacgcagggttgttggaggccgcagatattctgttatgtatgcggcattgcgaaacaagtaatgtgttgcatccctattaatccgcatgatgccgggtttacttccccggcagtgctttcatttcagcgtacaatcgccacattgctgcacatccggtaagcgataacgctggcagcaagtgcggcgcaccagcaggccgtcgcgcagtaccacggtacgccagagtggattatcttcaccgttcgtgagcgttttctcaaaaaagagggcatggcgcaggctttcaacagtagcctcgccgagcagttgcttcatctcagtgagataccagttgatcaaataaccggtattactccagataagtttgccgttgatctctccggtcgcttctagtgcttgcacaaccggaaccagcgcctggctgattaacgtttccattcgatgctgcgggctatgtggtgttgcgtttttatcttcacacacatcgacccagaaacaggcgacgcgtccggtttcgtgaaactcagcatggaaatgttccgggctcacatctaatgccttttcctgcgtcagtagcgccagcattaatggtggcaccatcaggccgatataccattgtgcccatagactgatcagcggtttgttctcgcggatcatcatcggttggttgcgatagatatgatcggaatagaccgccagcagagaacttagcacattcggactactccattgcgccagcgtcatggcgttaagtggggcaggttcatccaggcggataaactccagcaaatgttcacgatgttttgcgatcgtcgcccgcacggcttgcgcaagcgtgggatcctgcggctggagatgcgttcgccagatgacatcttcatagagcggtgcggaacgataggccataatcgggatagtaatctaaatgataatgattgctaatcatagcgataggtttacccgatagcaagggatttatctggcttgcaaatgataaaaattatcatatgatattggttatcattatcaatgaaagagatgaaatcatgttgcaacgtacgctgggcagtggctggggagtgttgctgccgggattgctgattgcggggctgatgtatgcggatttaagcagtgatcagtggcggattgtcattctgatgggattagtattgacgccgatgatgctgtatcacaaacagttgcggcattacattttgctaccaagctgcctggcacttattgctggcatcatgctgatgataatgaatttgaatcagggatgaaaaatcaaggaagaaacaagaaaggaagtaaagataattggtgcgaggggggggacttgaacccccacgtccgtaaggacactaacacctgaagctagcgcgtctaccaattccgccaccttcgcacagtcatcttactttttttgatatcgcctcgtttggtgcgaggggggggacttgaacccccacgtccgtaagaacactaacacctgaagctagcgcgtctaccaattccgccaccttcgcccagtgcgagcaatatcaacgtggtttttggtgcgagggggggacttgaacccccacgtccgtaaggacactaacacctgaagctagcgcgtctaccaattccgccaccttcgcataccatcaattcttaaaaagaattgctaccacggaggcgcattctagtggttttcagcttttcgtcaatagttaattatcgacagaggtgtaattgctggaaaaatgtccatcaggaaactagcgtgcaggtttggtatgcatgcgggggcagatgccagatgcgacgctggcgcgtcttatctggcctacgaagggctaacgtgcaggttttgtaggtcggataaggcgttcacgccgcatccgacacggtattcggcgagataattaacctttcttcgcctggcgggtcataatggcgcgatacaccttgaagcgccctgtttgcgcgatcacttcgtggaagccaaatgtctcatccagcacgtccggataaggcaggaaggcgttcgctacaattcgcagctcgccgccgctattaagatgacgcaccgcaccgcgaatcagcgtttgcgccgcatccaggctggtttgcatcccatcgtggaacggcgggttggagatgatcatatcaaaacgacctttcacctcggaaaagacgttgctggcaaagacttcaccttcaacaccgttggccgcaagtgttgcgcggctggcttctaccgccggggcagagacatcgcacaaggtgagacgaattttcgggctatggcgcgcaaaggcaacactaagcacgcccgcgccacagccgacatccagcactttacctttcgtgtgcggagttaacgtgctgagcagcaactggctaccgacatccagaccgtcgcggctaaacacgccaggcagcgttttgaccgtcaggccatcgacgctgtattcgccccagaatttctccgcatcaaataccggctgtttttccagacgaccaaaatagaggccacagcgacgagcgctgtcgactttattcaacggcgcataatctgccagcatctgctcggcgctgcgcacgccgctgcggttctcgccaacgacaaaaatatctgtccccactggcagcagagaaagtaaattcatcaactggaactgggcttccggtttgttcttcggccagtagtaaatcagcgtatcgcaatctgcgacgtcatccgccgtggcgaccagactgaaacgggcgttatcccccatctggcggcttaatacctgccagtggtggaattgctgggtatgagcacggctggccgcggtatctaaacgcgcgggcaggtcatcctgtaagtctccggcaaacagaatacggctttgttcgaaatcatcactgtgacgcagcaagacttcacttgccggggtaaatgcagacatggaatgctcctcaattgatactggcggcgattatagccatatgttggcgcggtatcgacgaatttgctatatttgcgcccctgacaacaggagcgattcgctatgacatcccgacgagactggcagttacagcaactgggcattacccagtggagcctgcgtcgccctggcgcgttgcagggggagattgccattgcgatcccggcacacgtccgtctggtgatggtggcaaacgatcttcccgccctgactgatcctttagtgagcgatgttctgcgcgcattaaccgtcagccccgaccaggtgctgcaactgacgccagaaaaaatcgcgatgctgccgcaaggcagtcactgcaacagttggcggttgggtactgacgaaccgctaagtctggaaggcgctcaggtggcaagtccggcgctcaccgatttacgggcaaacccaacggcacgcgccgcgttatggcaacaaatttgcacatatgaacacgatttcttccctcgaaacgactgatttaccggcggcttaccacattgaacaacgcgcccacgcctttccgtggagtgaaaaaacgtttgccagcaaccagggcgagcgttatctcaactttcagttaacgcaaaacggcaaaatggcggcgtttgcgattacgcaagtggtgctggatgaagctacattgttcaatattgcggtcgatcctgactatcagcgtcagggattgggaagggcgctgctggaacatctgatcgacgaactggaaaaacgcggcgtggcgacactatggctggaagtccgtgctagtaacgctgccgccattgccctgtacgaaagtttaggctttaacgaggcgacgattcgccgcaattactaccccaccacggacggtcgcgaagacgccatcatcatggcgttgccaatcagtatgtaatacaaggtggaataatgaagtgggactggattttctttgatgccgatgaaacgctgtttacctttgacagtttcaccggcctgcagcggatgtttcttgattacagcgtcacctttaccgctgaagattttcaggactatcaggccgttaacaagccactgtgggtggattatcaaaacggcgcgatcactagtttacagcttcagcacgggcggtttgagagctgggccgaacggctgaacgtcgagccaggtaaactcaacgaagcctttattaatgcgatggcggaaatctgcacgccgctgccgggcgcggtttctctgcttaacgccattcgtggcaacgccaaaatcggcatcatcaccaacggctttagtgccttgcaacaggtgcgtctggaacgcacgggcctgcgtgattacttcgatttgctggtgatttccgaagaagttggcgttgccaaaccgaataagaaaattttcgattatgcgctggaacaggcgggcaatcctgaccgtagtcgcgtgctgatggttggcgacactgccgagtccgatattctcggtggcatcaacgccgggcttgcgacctgctggctgaatgcacaccatcgcgagcaaccagaaggcatcgcgcccacctggaccgtttctagcttgcacgaactggagcagctcctgtgtaaacactgattgcctcccccccgttgatgggtaaaatagccgcaatttttcgttttcaacaagcgcggcgcgatgccgcttactcaagaagaaagaattatgacgttgtctccttatttgcaagaggtggcgaagcgccgcacttttgccattatttctcacccggacgccggtaagactaccatcaccgagaaggtgctgctgttcggacaggccattcagaccgccggtacagtaaaaggccgtggttccaaccagcacgctaagagcgactggatggagatggaaaagcagcgtgggatctccattactacgtctgtgatgcagtttccgtatcacgattgcctggttaacctgctcgacaccccggggcacgaagacttcagcgaagatacctatcgtaccctgacggcggtggactgctgcctgatggttatcgacgccgcaaaaggtgttgaagatcgtacccgtaagctgatggaagttacccgtctgcgcgacacgccgatcctcacctttatgaacaaacttgaccgtgatatccgcgacccgatggagctgctcgatgaagttgagaacgagctgaaaatcggctgtgcgccgatcacctggccgattggctgcggcaagctgtttaaaggcgtttaccacctttataaagacgaaacctatctctatcagagcggtaaaggccacaccattcaggaagtccgcattgttaaagggctgaataacccggatctcgatgctgcggttggtgaagatctggcacagcagctgcgtgacgaactggaactggtgaaaggcgcgtctaacgagttcgacaaagagctgttccttgcgggcgaaatcactccggtattcttcggtactgcgctgggtaacttcggcgtcgatcatatgttggatggcctggtggagtgggcacctgcgccgatgccgcgtcagactgatacccgtaccgtagaagcgagcgaagataaatttaccggcttcgtatttaaaattcaggccaacatggacccgaaacaccgcgaccgcgtggcgtttatgcgtgtggtgtccggtaaatatgaaaaaggcatgaaactgcgccaggtgcgcactgcgaaagatgtggtgatctccgacgcgctgacctttatggcgggtgaccgtagccacgttgaagaagcgtatccgggcgatatcctcggcctgcacaaccacggcaccattcagatcggcgacacctttacccagggtgagatgatgaagttcaccggtattccgaacttcgcaccagaactgttccgtcgtatccgcctgaaagatccgctgaagcaaaaacagctgctcaaagggctggtacagctttccgaagagggcgcggtgcaggtgttccgtccaatctccaacaacgatctgatcgttggtgcagttggtgtgctgcagtttgatgtggtggtagcgcgcctgaagagcgaatacaacgttgaagcagtgtatgagagtgtcaacgttgccactgcccgctgggtagaatgtgcagacgcgaagaaattcgaagagttcaagcgtaagaacgaaagccaactggcgcttgatggcggcgataacctcgcttacatcgctaccagcatggtcaacctgcgcctggcacaggaacgttatccggacgttcagttccaccagacccgcgagcattaattcttgcctccagggcgcggtagccgctgcgccctgtcaatttcccttccttattagccgcttacggaatgttcttaaaacattcacttttgcttatgttttcgctgatatcccgagcggtttcaaaattgtgatctatatttaacaaagtgatgacatttctgacggcgttaaataccgttcaatgcgtagatatcagtatctaaagccgtcgattgtcattctaccgatattaataactgattcagaggctgtaatggtcgttattcatcactcatcgcttttgtgatggcgaccattgacttctgtagagggtgaagtctctccctattcagcaatgcaacctcgtgttgccaggctcaaattacgagcaaacatacaggaataaatcgatgactatgacaagactgaagattagcaaaactctgctggctgtaatgttgacctctgccgtcgcgaccggctctgcctacgcggaaaacaacgcgcagactaccaatgaaagcgcagggcaaaaagtcgatagctctatgaataaagtcggtaatttcatggatgacagcgccatcaccgcgaaagtgaaggcggccctggtggatcatgacaacatcaagagcaccgatatctctgtaaaaaccgatcaaaaagtcgtgaccctgagcggtttcgttgaaagccaggcccaggccgaagaggcagtgaaagtggcgaaaggcgttgaaggggtgacctctgtcagcgacaaactgcacgttcgcgacgctaaagaaggcagcgtgaagggctacgcgggtgacaccgccaccaccagtgaaatcaaagccaaactgctggcggacgatatcgtcccttcccgtcatgtgaaagttgaaaccaccgacggcgtggttcagctctccggtaccgtcgattctcaggcacaaagtgaccgtgctgaaagtatcgccaaagcggtagatggtgtgaaaagcgttaaaaatgatctgaaaactaagtaattcgtcgtaattcgtcctcccgaactttgtcgggaggcgcgatgtgcaccacactaaaaatatcgcattgagtgattttcacgctcatatcaagcggtgacattaactatggtaaaggagacgcttatgtttcgttggggcatcatatttctggttatcgcgttaatcgccgccgcacttgggtttggtggtctggccggtaccgctgcaggcgcagctaaaattgtctttgtcgtcgggattattctgttcctggtgagtttgttcatgggccgaaaacgaccctaaatttcagaccattaagaaaattttatccaaagccagtccagcggactggcttttgcggttttagcgaataataaattgcgttactttgtcattctttcacaacaaaaacaggaaggcagaggtggggcagcgaatacctgtaacgcttggtaatattgcgccgttgagcctaaggccgttccagcctggacgaatagctctggtgtgcgaaggcggcggacagcgtggaattttcacggctggcgtgctggatgagtttatgcgcgcgcagtttaatcctttcgatctttatctcggcacatctgccggggcgcagaacctcagcgcgtttatctgcaatcagcccggttacgcgcgcaaagtcatcatgcgctataccacaaaacgcgaatttttcgatccattgcgctttgtccgtggaggaaatcttatcgatctcgactggctggtggaggccactgcaagccagatgccgttgcaaatggataccgccgcgcggttgtttgacagcggcaaaagcttttatatgtgcgcctgtcgtcaggatgactacgcgccgaattactttttaccaaccaaacaaaactggctggatgtgattcgcgcctccagtgcgatacctggcttttatcgtagcggagtgagcctggaaggcattaactacctggatggcgggatcagtgatgcgattccggttaaagaggcggcaaggcagggcgctaaaacgttggtcgtcattcgcactgtgccgagtcaaatgtactacacgccgcagtggttcaaacgcatggaacgctggctgggtgacagtagcctgcagccgctggtcaatctggtgcagcatcatgaaaccagctatcgtgacattcagcaatttattgagaaaccaccgggcaagctgcggatattcgaaatttatccgccgaagccattacatagtatcgcgcttggcagtcggattccggcgctgcgtgaagactataaacttgggcgtttatgcggtcgttatttcctcgccacggttggcaagctattaactgaaaaagcgccgcttacccgccatctggtgccagtggtgacgccggaaagcattgtcattccgcctgcgccagtcgccaacgatacgctggttgccgaagtgagcgacgctccgcaggcgaacgacccgacatttaacaatgaggatctggcttgatttgccgttttatcgacacccactgccattttgatttcccgccgtttagtggcgatgaagaggccagcctgcaacgcgcggcacaagcgggcgtaggcaagatcattgttccggcaacagaggcggaaaattttgcccgtgtgttggcattagcggaaaattatcaaccgctgtatgccgcattgggcttgcatcctggtatgttggaaaaacatagcgatgtgtctcttgagcagctacagcaggcgctggaaaggcgtccggcgaaggtggtggcggtgggggagatcggtctggatctctttggcgacgatccgcaatttgagaggcagcagtggttactcgacgaacaactgaaactggcgaaacgctacgatctgccggtgatcctgcatagtcggcgcacgcacgacaaactggcgatgcatcttaaacgccacgatttaccgcgcactggcgtggttcacggtttttccggcagcctgcaacaggccgaacggtttgtacagctgggctacaaaattggcgtaggcggtactatcacctatccacgcgccagtaaaacccgcgatgtcatcgcaaaattaccgctggcaagcttattgctggaaaccgacgcgccggatatgccgctcaacggttttcaggggcagcctaaccgcccggagcaggctgcccgtgtgttcgccgtgctttgcgagttgcgccgggaaccggcggatgagattgcgcaagcgttgcttaataacacgtatacgttgtttaacgtgccgtaagccggataaggcgttcacgccgcatccggcagttggcgcacaatgcctgatgcgacgcttaacgcgtcttatcatgcctacaggtttgtgccgaaccgtaggccggataaggcgttcacgccgcatccggcagttggcgcacaatgcctgatgcgacgcttgtcgcgtcttatcatgcctacaagtctgtgccgaaccgtaggccggataaggcgttcacgccgcatccggcagtcggcgcataatgcctgatgcgacgcttgtcgcgtcttatcatgcctacaggtttgtgccgaaccgtaggccggataaggcgttcgcgccgcatccggcagttggcgcacaatgcctgatgcgacgcttgacgcgtcttatcaggcctacaagtctgtgccgaaccgtaggccgtatccggcatgtcacaaatagagcgccggaaatatcaaccggctcaccccgcgcacctttaacgcatcagccaacggctcaacgtcttccggcgtggcgctcgcccagctttgcgcctcgccatacacgccgtgggcatgaaacgcgttcaggcgtaccggaacatcgccgagtcccttgataaacgccgccagttcttcgatgtgttgcaaataatccacctggccagggatcaccagcaaacgcagttccgccagcttgccgcgctctgccagcaaatagatgctgcgcttaatctgctgattatcgcgtccggtgagttgttgatgacattcgctcccccacgctttgagatcgagcattgcgccgtcgcacaccgggagcaatttttcccagccggtttcgctcaacatgccgttactgtccaccagacaggtgagatggcgcagttgcggatcgtttttgatagcagtaaacagcgccaccacaaacggcagctgggtcgtggcttcaccgccactcaccgttatcccttcgataaacagcactgctttgcggacatggctaagcacttcgtccacgctcatggattgcgccatgggcgtggcatgttgcggacacctcttcaggcaggtatcacactgctcgcaaaccacagcgttccacaccactttgccgtcaacaatctgcaacgcctgatgcggacactgtggcacgcactccccacagtcattgcaacgtcccatcgtccacggattgtgacagtttttgcagcgcagattgcagccctgcaaaaacagagccagacgactgcctggcccgtcaacgcaggagaaggggataatcttactgactaaagcgcatctgctgttcatggcttatcacgcgcggctggcgttccagaatacgagtgttgcgtgcggcttcttcgcccagccaggtggtgttggtgcgactaccttcggcgcgatatttttctaaatcgctcaaacgcaccatataaccggtaacgcgaaccagatcgttaccgctgacattggcggtaaattcacgcattccggctttaaaggcaccgaggcaaagctgtaccagtgcctgcgggttacgtttgatggtttcgtcgagcgtcagaatgtcgctgatgccggaataataataagcatgatgcggggcgacagtttgcagatgggtgatcggatctggctcatcgccatacggcaaacgcgcgcccggcgtggtgccgatatcggaactgatcccgctctgtgcgtgtaacatggcgcgtttttgccagccatatttcacgggggtattggcgacaaactccgccagttgcgcgctgatgcgataacctacttcatttgcggcggcttctttaccgtagcgcgcggcaatcccttctttttcacacagcaagttaaccgcttccgccagcccatacatgccaaacattggcacaaaacgttcagggttaatcagcccttctttcaccaggaagctattctcaaagaagtgactttgttgatagaggaattcacaccgcgcatcgatgatggcgatctgctgctggcagtagtgcggtagagtgcgcgtaaagaagtcatccaggctttcgctgcgctcggcaatggctttcaggttaaggcgtaccagcgtgctgccaccacccgccagcggcagactgttgtaacagctcacaatcccgtagcccccttttgtgaaaattttatcatgcaccggaccgttggcgatgtgcggtttgctacattcacagatgttcttcgccacttccagcagcaggtcatcaggggtgatttcaggatcgtagataaaggtcaggttcggactaacctgcttcaactctgcatctgcacgtaagatcgcgcgggtaatggggctatcagacgggccgatattggcgtgcataaaggcgtctggcagggttctgtcgaggtaacgccagaaacgttttattcgaacatcgatctcgtcttgtgttagaattctaacatacggttgcaacaacgcatccagttgccccaggtagaccggcatgcttgtgacgctcggtacgtggtggtaaagaatggtcagcagagagagtgcgtcatcaagatctttcgcgccttccagctccagccattcggaaccgttcgccagaaaacgggcgtaatcgggtaagacatagcgcggtttgtacggcgcatgaccttcaaacatatcgcagattacaccttcatccagcgcgcggcgggcttcggcaggaagctgtgggtaaggcagattgttttctgcttccagtgccagaaaatggcgcttctgctccgggctaagcactgggctggtgacaatttgctggcaacgttgttgcagtgcattttcatgagaagtgggcatcttcttttccttttatgccgaaggtgatgcgccattgtaagaagtttcgtgatgttcactttgatcctgatgcgtttgccaccactgacgcattcatttgaaagtgaattatttgaaccagatcgcattacagtgatgcaaacttgtaagtagatttccttaattgtgatgtgtatcgaagtgtgttgcggagtagatgttagaatactaacaaactcgcaaggtgaattttattggcgacaagccaggagaatgaaatgactgatctgaaagcaagcagcctgcgtgcactgaaattgatggacctgaccaccctgaatgacgacgacaccgacgagaaagtgatcgccctgtgtcatcaggccaaaactccggtcggcaataccgccgctatctgtatctatcctcgctttatcccgattgctcgcaaaactctgaaagagcagggcaccccggaaatccgtatcgctacggtaaccaacttcccacacggtaacgacgacatcgacatcgcgctggcagaaacccgtgcggcaatcgcctacggtgctgatgaagttgacgttgtgttcccgtaccgcgcgctgatggcgggtaacgagcaggttggttttgacctggtgaaagcctgtaaagaggcttgcgcggcagcgaatgtactgctgaaagtgatcatcgaaaccggcgaactgaaagacgaagcgctgatccgtaaagcgtctgaaatctccatcaaagcgggtgcggacttcatcaaaacctctaccggtaaagtggctgtgaacgcgacgccggaaagcgcgcgcatcatgatggaagtgatccgtgatatgggcgtagaaaaaaccgttggtttcaaaccggcgggcggcgtgcgtactgcggaagatgcgcagaaatatctcgccattgcagatgaactgttcggtgctgactgggcagatgcgcgtcactaccgctttggcgcttccagcctgctggcaagcctgctgaaagcgctgggtcacggcgacggtaagagcgccagcagctactaagtaagatgctttacgcctgatgcgctgcgcttatcaggcctacgagacgtatctacccgtaggccggataaggcgtagacgcatccggcaaaagccgcctcatactcttttcctcgggaggttaccttgtttctcgcacaagaaattattcgtaaaaaacgtgatggtcatgcgctgagcgatgaagaaattcgtttctttatcaacggtattcgcgacaacactatctccgaagggcagattgccgccctcgcgatgaccattttcttccacgatatgacaatgcctgagcgtgtcagcctgaccatggcgatgcgagatagtggaaccgttctcgactggaaaagcctgcatctgaatggcccgattgttgataaacactccaccggtggcgtcggcgatgtgactagcctgatgttggggccgatggtcgcagcctgcggcggctatattccgatgatctctggtcgcggcctcggtcatactggcggtacgctcgacaaactggaatccatccctggcttcgacattttcccggatgacaaccgtttccgcgaaattattaaagacgtcggcgtggcgattatcggtcagaccagtagtctggctccggctgataaacgtttctacgcgacccgtgatattaccgcaaccgtggactccatcccgctgatcaccgcctctattctggcgaagaaacttgcggaaggtctggacgcgctggtgatggacgtgaaagtgggtagcggcgcgtttatgccgacctacgaactctctgaagcccttgccgaagcgattgttggcgtggctaacggcgctggcgtgcgcaccaccgcgctgctcaccgacatgaatcaggtactggcctccagtgcaggtaacgcggttgaagttcgtgaagcggtgcagttcctgacgggtgaatatcgtaacccgcgtctgtttgatgtcacgatggcgctgtgcgtggagatgctgatctccggcaaactggcgaaagatgacgccgaagcgcgcgcgaaattgcaggcggtgctggacaacggtaaagcggcagaagtctttggtcgtatggtagcggcacaaaaaggcccgaccgacttcgttgagaactacgcgaagtatctgccgacagcgatgctgacgaaagcagtctatgctgataccgaaggttttgtcagtgaaatggatacccgcgcgctggggatggcagtggttgcaatgggcggcggacgccgtcaggcatctgacaccatcgattacagcgtcggctttactgatatggcgcgtctgggcgaccaggtagacggtcagcgtccgctggcggttatccacgcgaaagacgaaaacaactggcaggaagcggcgaaagcggtgaaagcggcaattaaacttgccgataaagcaccggaaagcacaccaactgtctatcgccgtatcagcgaataacggtatactgatctgatcatttaaatttgaagcactgagtacggagaacatatgaaacgtgcatttattatggtgctggacagtttcggcatcggcgctacagaagatgcagaacgctttggtgacgtcggggctgacaccctgggtcatatcgcagaagcttgtgccaaaggcgaagctgataacggtcgtaaaggcccgctcaatctgccaaatctgacccgtctggggctggcgaaagcacacgaaggttctaccggtttcattccggcgggaatggacggcaacgctgaagttatcggcgcgtacgcatgggcgcacgaaatgagttccggtaaagataccccgtctggtcactgggaaattgccggtgtcccggttctgtttgagtggggatatttctccgatcacgaaaacagcttcccgcaagagctgctggataaactggtcgaacgcgctaatctgccgggttacctcggtaactgccactcttccggtacggtcattctggatcaactgggcgaagagcacatgaaaaccggcaagccgattttctatacctccgctgactccgtgttccagattgcctgccatgaagaaactttcggtctggataaactctacgaactgtgcgaaatcgcccgtgaagagctgaccaacggcggctacaatatcggtcgtgttatcgctcgtccgtttatcggcgacaaagccggtaacttccagcgtaccggtaaccgtcacgacctggctgttgagccgccagcaccgaccgtgctgcagaaactggttgatgaaaaacacggccaggtggtttctgtcggtaaaattgcggacatctacgccaactgcggtatcaccaaaaaagtgaaagcgactggcctggacgcgctgtttgacgccaccatcaaagagatgaaagaagcgggtgataacaccatcgtcttcaccaacttcgttgacttcgactcttcctggggccaccgtcgcgacgtcgccggttatgccgcgggtctggaactgttcgaccgccgtctgccggagctgatgtctctgctgcgcgatgacgacatcctgatcctcaccgctgaccacggttgcgatccgacctggaccggtactgaccacacgcgtgaacacattccggtactggtatatggcccgaaagtaaaaccgggcagtctgggtcatcgtgaaaccttcgcggatatcggccagactctggcaaaatattttggtacttctgatatggaatatggcaaagccatgttctgatggatttgggcggagcgttgactccgcctttgttatgtcacaaaaaggataaaacaatggctaccccacacattaatgcagaaatgggcgatttcgctgacgtagttttgatgccaggcgacccgctgcgtgcgaagtatattgctgaaactttccttgaagatgcccgtgaagtgaacaacgttcgcggtatgctgggcttcaccggtacttacaaaggccgcaaaatttccgtaatgggtcacggtatgggtatcccgtcctgctccatctacaccaaagaactgatcaccgatttcggcgtgaagaaaattatccgcgtgggttcctgtggcgcagttctgccgcacgtaaaactgcgcgacgtcgttatcggtatgggtgcctgcaccgattccaaagttaaccgcatccgttttaaagaccatgactttgccgctatcgctgacttcgacatggtgcgtaacgcagtagatgcagctaaagcactgggtattgatgctcgcgtgggtaacctgttctccgctgacctgttctactctccggacggcgaaatgttcgacgtgatggaaaaatacggcattctcggcgtggaaatggaagcggctggtatctacggcgtcgctgcagaatttggcgcgaaagccctgaccatctgcaccgtatctgaccacatccgcactcacgagcagaccactgccgctgagcgtcagactaccttcaacgacatgatcaaaatcgcactggaatccgttctgctgggcgataaagagtaattgtgtttcgctgcaaggcgattgccttgtgaagccggagcgggagactgctccggctttttagtatctattcatttttctctccagcttgaatattttcgctatacttttcagtgaaatgtgttaataaatctattcaagtatctattcacgaatctattcattaatgagcgagctgactgatcttttactgcaagggccgcgttctgccccggaattgcgccagcgtctggcaatcagtcaggcgacgttcagtcgccttgttgccagagaagatcgggtgattcgctttggtaaagcacgggcaacgcgatatgcactgctgcgtccttatcgcggaattgagcgtattcccgtctggcgggtggacgataccggaaaggcgcataaattcgccgacatccggttgtgctggccgcagggaagttgtctggtaacaggcgcagatggcgacgaacagtggtttgatggtttgccctggtatttgaccgatctccgaccgcagggctttttagggcgcgcgtggggcaggaagttagccgcgcaactgaatctgactgatgatatacgtctctggcaggaagaagatgtgctctacgccctgaccgtatttaacggtgaatatactggcggttggttggtcggggaggggaattatcagcgatggattactgcacaacaccctgcggaaattcctctggatcaaaaactcacccattacgaacagctggcaagtgatgcactggcaggagaaattgtgggttcttctgcgggcggcgagcagccaaaatttacctactatgcacaaacgccgagtggcaataaacatgtgttggtgaaattcaccgtaccacagcaaaccgcggtcagccaacgttggggtgacctgctaattgctgaatctattgccgcgcaaatcctgcgtgacggtgggatccacgccatcgagagtacggtgcttgtaacaagtaacaggcaggtattcctcgaagcggaacgctttgactgcaaaggtaacgatggtcgcttgcctattgtgagcctggaggcggtgcagagtgagtttatctcttctccgggaagctggccgcaggcaatgcgccgtttgtgtgagcaacaacttgtcactcaccagagcgtggcgcaaacagaagtgatctgggcatttgggcgacttatcgccaacagcgatatgcacgcaggtaatttaagcttttatttatctgaaccgccatttgcgctgacgcccgtctacgacatgctgccgatggtctatgcaccaaacagcgctggaatgctgcgtgatgctgccattgaggtgaagtttgatcttaacgtcagtaaaagcgcttggttaacggcgatcccgctggcgcagcagttctggcaaacggtcgccagagatccgcgtatcagcgaggcgtttcgccacattgcgcaagaaatgccggaaaaaatccggcaaatcgaagagaaagttgcccgcatgggcgggtaattaccttacagcccccgccatccatgcgcttaactcccgtagctctttttcctgttccgggaagtcaaccaacagcgcttcgcactcctgttgcagcatatctgcgcggtacaggcagccttgcagtcgtccggcgagggcttccagcggcgcggggttgaggctgtcggtaaacacctgggcgcgggtgatatggcctttttcaacgtcgaaatgcagttccacgccgccccaggtaaagcgttcatccagcagatggctgaatgccggagcctgaccgaagttccattcccagctactctggcgggcaaaggtttcggcgaagtttggcaagtctggcgttttgttcggggagatgatttccgcttccacgcgctcgccataatgggcgaaaaaggcctcggttatggcctcgcaaacctgctcatgggtgatccccggcaacagctcggtgaggttggtcacgcgggaacgtacgctcgtaatgcctttcgccgccagtttctttttatccggattgagatagtttgccaggcggctgaggtcggcattgagtagcaaggtgccgtggtggaagccgcgatctttggtttcgcgataggcgctgccactgactttgcggtcgccttcgacggttttcaccaccagatcgttacgtccggacgcttcggcgctgacgccgagcgcgttcagcgcattgagcacaatgctcgtggagatagttttatcgtactccggcttgccagccataaaggtaaagcaggtattgccgagatcgtggaacaccgcgccgccaccgctactgcgccgcgccaggcggacgttatcttcttccatccgccgggtattacactctttccacgggttctgcgcgcgaccaattactaccgtgtcggcattgcgccagagaaacagaacgcgctgcgtggcgggcatttggcgaaaaatacactcttccaccgccaggttaaaccacgggtcgtaagagtcagagatgagcaggcgtaatgtggacataacgatttcctttcttgtagtaatgggtcactcttttttctcgctttcttcctcttccggcaccggtttgctggcggctaacaggaaggggctttgctgccagcgggtgcgtttaccctgtagcagcgtgcgggtcagcactacaccgattgccagactgagcagcaacatcaggcgtaaaatgttagtggtgttatccacctgttgggcttcggtggcgagcgtatgggtgtcgagtgtcaggcgcagatagccgagcggtccgtttttacccgcaattggctcgacaatctgctggttaaaatagccgcctgcttttttaccgtcgagcgccagccggtcgcgcacttcgacgctttcgccagaacgtgcgataagatcgccttgttcgtcatacacacccgcgtcgaggatacggctttcatccgttaactgatcgaggatcgcctgaatgcgtttttcatccggactgtcggtacgcatcagcggtgcaacgttcagcgtcacctgacgcgccagggtgcgggccagttcttccagctgtggattacgctgtcgctggtggttttgactaaaccaactcgctccctgcatcagcgccactaacaaggcaagacagaacaggacaatcactgcccgatgcagccggaatttcagttttgtgcgagccatcttccaccctttgaaaatttgagacttaatgttgccagaagcaatggatacaaggtagcctcatgcgttattttccctgcttcgaacgattttacaggagccttaatgcctaacattacctggtgcgacctgcctgaagatgtctctttatggccgggtctgcctcttagtttaagtggtgatgaagtgatgccactggattaccacgcaggtcgtagcggctggctgctgtatggtcgtgggctggataaacaacgtctgacccaataccagagcaaactgggtgcggcgatggtgattgttgccgcctggtgcgtggaagattatcaggtgattcgtctggcaggtagtctcaccgcacgggctacacgcctggcccacgaagcgcagctggatgtcgccccgctggggaaaatcccgcacctgcgcacgccgggtttgctggtgatggatatggactccaccgccatccagattgaatgtattgatgaaattgccaaactggccggaacgggcgagatggtggcggaagtaaccgaacgggcgatgcgcggcgaactcgattttaccgccagcctgcgcagccgtgtggcgacgctgaaaggcgctgacgccaatattctgcaacaggtgcgtgaaaatctgccgctgatgccaggcttaacgcaactggtgctcaagctggaaacgctgggctggaaagtggcgattgcctccggcggctttactttctttgctgaatacctgcgcgacaagctgcgcctgaccgccgtggtagccaatgaactggagatcatggacggtaaatttaccggcaatgtgatcggcgacatcgtagacgcgcagtacaaagcgaaaactctgactcgcctcgcgcaggagtatgaaatcccgctggcgcagaccgtggcgattggcgatggagccaatgacctgccgatgatcaaagcggcagggctggggattgcctaccatgccaagccaaaagtgaatgaaaaggcggaagtcaccatccgtcacgctgacctgatgggggtattctgcatcctcagtggcagcctgaatcagaagtaattgctcgcccgccatcctgcgggcggcacagcattaacgaggtacaccgtggcaaaagctccaaaacgcgcctttgtttgtaatgaatgcggggccgattatccgcgctggcaggggcagtgcagtgcctgtcatgcctggaacaccatcaccgaggtgcgtcttgctgcgagcccaatggtggcgcgtaacgagcgtctcagcggctatgccggtagcgccggggtggcaaaagtccagaaactctccgatatcagccttgaagagctgccgcgtttttccaccggatttaaagagttcgaccgcgtactaggcggcggcgtggtgccaggaagtgccattctgattggcggtaaccctggtgcggggaaatccacgctgctactgcaaacgctgtgcaaactggcccagcagatgaaaacgctgtatgtcaccggcgaagagagcctgcaacaggtggcaatgcgcgctcatcgccttggcctgccgactgacaatctcaatatgttgagcgaaaccagcatcgaacagatctgcctgattgccgaagaagagcaaccgaagctgatggtaattgacagcatccaggtgatgcatatggcggatgtacagagtagccctggtagcgtggcgcaggtgcgtgaaacggcggcttatttgacacgcttcgccaaaacgcgcggtgtggcgattgtcatggtggggcacgtaaccaaagatggtagcctggctggcccgaaagtgctggaacactgtatcgactgtagcgtgcttttggatggcgatgccgactcccgttttcgcaccttgcgcagccataaaaaccgcttcggcgcggtgaatgagctgggcgtcttcgcgatgaccgaacaggggctgcgtgaagtcagcaaccctagcgcaattttcttaagtcgcggcgatgaagtgacctccggtagcagtgtgatggtggtatgggaaggaacgcgtccactgctggtggagattcaggcgctggtcgatcacagcatgatggcgaacccacgccgcgtggcagtggggctggaacaaaaccgtctggcaatcctgctggctgtgttgcaccgtcacggtggtctgcaaatggccgatcaggatgtgtttgtgaacgtggtcggcggcgtgaaggtaaccgaaaccagtgccgacttagcgttactgctggcgatggtttccagcctgcgcgacagaccgctgccgcaggatctggtggtgtttggtgaagtcgggctggcaggggagatccgcccggtgcccagcggtcaggaacgaatctctgaagcggcgaaacacggttttcgccgggcgattgttccggcggctaacgtgccgaaaaaagcgccggaagggatgcagatttttggcgttaaaaaactctccgacgcgcttagcgtgttcgacgacttataatgagatatacggagggagatatgagcagttttgattacctgaaaactgccatcaagcaacagggctgcacgctacagcaggtagctgatgccagcggtatgaccaaagggtatttaagccagttactgaatgccaaaatcaaaagccccagcgcgcaaaagctggaggcgttgcaccgttttttggggcttgagtttccccggcagaagaaaacgatcggtgtcgtattcggtaagttctacccactgcataccggacatatctaccttatccagcgcgcctgtagccaggttgacgagctgcatatcattatgggttttgacgatacccgtgaccgcgcgttgttcgaagacagtgccatgagccagcagccgaccgtgccggatcgtctgcgttggttattgcaaacttttaaatatcagaaaaatattcgcattcatgctttcaacgaagagggcatggagccgtatccgcacggctgggatgtgtggagcaacggcatcaaaaagtttatggctgaaaaagggatccagccggatctgatctacaccagcgaagaagccgatgcgccacagtatatggaacatctggggatcgagacggtgctggtcgatccgaaacgtacctttatgagtatcagcggtgcgcagatccgcgaaaacccgttccgctactgggaatatattcctaccgaagtgaagccgttttttgtgcgtaccgtggcgatccttggcggcgagagcagcggtaaatccaccctggtaaacaaacttgccaatatcttcaacaccaccagtgcgtgggaatatggccgcgattatgtctttagtcacctcggcggtgatgagatcgcattgcagtattctgactacgataaaatcgcgctgggccacgctcaatacattgattttgcggtgaaatatgccaataaagtggcatttatcgataccgattttgtcaccactcaggcgttctgcaaaaagtacgaagggcgggaacatccgttcgtgcaggcgctgattgatgaataccgtttcgatctggtgatcctgctggagaacaacacgccgtgggtggcggatggtttacgcagcctcggcagtagcgtggatcgcaaagagttccagaacttgctggtggagatgctcgaagagaacaatatcgaatttgtgcgggttgaagaggaagattacgacagtcgtttcctgcgctgcgtggaactggtgcgggagatgatgggggagcagagataaccgtgatgaaactgctcaaaggcgaggtataaaatgagtttttttgatgagttgaaaacctctctggaagaggctgtcgagattaaacaaggtttgaaaaaacctgcacgggtgacccgccacgaaattgaggatgctaaggctgttgtagaccggaaacggtgttcacgccgcatccggcattcggtgctcaatgcctgatgcgacgcttaccgcgtcttatcaggcctacagttttacaacgtattgaaattgctggttttgtaggccggataaggcgttcgcgccgcatccggcattttacgcattacttcgcaatacgcttgtacttgatacgcttcggctccagcgcgtctgcgcccagcgtgcgtttcttgtactcttcgtactcggtaaagttaccttcgaagaactcaactttaccttcatcctggtaatccagaatgtgcgtggcgatacggtcgaggaaccaacggtcgtggctgataaccatcgcacagcccgggaactccagcagggcgttttccagcgcgcgcagggtttcgatatccaggtcgttggttggttcgtcgagcagcagcatgttgccgccaacctgcagcagcttcgccagatgcagacgaccgcgctcaccaccggagagttcaccaacgcgtttaccctgatcaacccctttaaagttaaagcggccaacgtaggcgcggcttggcatctcggtgttgccgatcttcatgatatccagcccgccggaaacttcttcccaaacggttttgctgttatccatactgtcacggaactgatcaacgctcgccagtttcaccgtttcacccaaagtgatggtgccgctgtccggctgttcctgaccagagatcatacggaacagggtgcttttacccgcaccgttcggaccgatgatcccgacgatcgctcctttcgggatgctgaagctcaggtcatcaatcagcagacgatcgccataggatttacgcaggttgctgacttccagcactttatcgcccagacgcggtccaggtggaataaacagttcgttggtttcgttacgtttctgatattcggtgctgttcagttcttcaaagcgcgccagacgtgctttacctttgctctgacggcctttagtaccttgacgtacccattccagctctttctcaatgctcttacgacgcgccgcttcttgactagcttcctgcgccaggcgctgatctttctgctccagccaggaggagtagttaccttcccacggaataccttcaccgcggtcaagttcgaggatccagcctgcaacgttatcgaggaagtaacggtcgtgggtaatcgccacaacggtgccttcgaagtcgtgcaggaagcgttccagccaggccacggattcggcatccaggtggttggtcggttcgtcgagcagcagcatgtctggtttttccagcagcaggcggcacaacgctacgcgacgacgttcaccaccggagaggttagcgattttcgcgtcccagtccggcagacgtagcgcatccgccgcacgctccagctgtacgttcagattatgaccgtcgtgagcctgaatgatctcttccagacggccttgttcagcggccagcttgtcaaaatcggcatccggatcggcgtacagcgcatacacttcatccaggcgtttcagggcgttaaccacttcactaaccgcttcttcaatggactcacgcacggtgtgttccgggttcagctgcggttcctgcggcagataaccaatcttgatgtctggctgcggacgcgcttcaccttcgatgtctttatcaatgcccgccataatgcgcagcagggtggacttacccgcgccattcagacccaggacaccaatttttgccccagggaagaaactcagagagatgtttttcaaaatatgacgtttcggcggaacaactttgccgacacgatgcatggtataaacgaattgagccacgttggacttcgcctctatgtttatcgtgataatgagttttcaaaggcgaagtgtagcctttttccccgcctaatcccagccggtcgatcaccctcgcagtaaaagtaaaaaagtgtccgtaacgtggcgtaaacggcaatgactggttagcataaatctattacgcggcatgacgctgcattgatgtatttacacttagaggatgcgcttgtggaaaaagccaaacaagttacctggcggctgttggctgccggtgtctgtctgctgacggtcagcagcgtggcgcgagccgacagtctggatgagcagcgtagtcgttacgcgcaaatcaagcaggcctgggataatcgacaaatggatgtggtcgaacaaatgatgcctggactgaaggattatccgctttatccctacctggaataccgccagatcaccgatgatctgatgaatcaaccggcggtgacggtcactaactttgttcgcgctaaccccacgcttcctcccgctcgcacgctgcaatctcgtttcgtcaatgaactggcgcggcgtgaagactggcgtggcttgttagcctttagcccggaaaagcccggaactaccgaagcgcaatgtaattactactatgcgaaatggaacaccgggcagagtgaagaagcctggcaaggggcgaaagagctgtggctaaccggcaagagccagcctaacgcctgtgacaagttatttagcgtctggcgtgcgagtggtaaacaagatccgctggcgtatttagagcgtatccgtctggcgatgaaagcgggtaacacaggcctggtaacagtgctggcagggcagatgcctgccgattaccagactatcgccagcgcaatcattagtctggcgaacaaccctaatacggtactgaccttcgcgcgtacaactggcgcgaccgattttacccgtcaaatggcggcggtggcgtttgccagtgtggcgcggcaggatgctgagaatgcacggctgatgatcccaagccttgcccaggcgcagcagcttaatgaagatcagattcaggagctgcgcgatatcgtcgcctggcgtttgatgggcaacgatgtcaccgacgagcaggcgaaatggcgcgatgacgccattatgcgcagccaatctactagccttattgaacgccgtgtacgaatggcgcttggcaccggcgatcgtcgcggcctgaatacctggctggcgcgtctgcctatggaagcgaaagagaaagatgaatggcgttactggcaggcggatttattgctggaacgcggacgtgaagctgaagcaaaagagattttgcatcaactcatgcaacagcgtggtttctacccgatggttgcagcacaacgcatcggcgaagagtatgagctgaagattgataaagcgccgcagaatgttgacagcgccctgactcaggggccggagatggcgcgcgtgcgcgagttgatgtactggaatctcgataataccgcgcgtagcgagtgggccaatctggtgaagagcaagagtaaaacagagcaggctcaactggcgcggtatgctttcaacaaccaatggtgggatcttagcgttcaggcaacgatcgccgggaagctgtgggatcatctggaagagcgattcccgctggcttacaacgatcttttcaagcgctacaccagcggtaaggagatcccgcaaagctatgcgatggcgattgctcgtcaggagagcgcctggaatccgaaagtgaaaagtccggtaggggccagcggcttgatgcagattatgcctggtacagcgacccatacggtgaagatgttctctattcccggttatagcagtcctgggcaattgctggatccggaaacgaatatcaacattggcaccagttacctgcaatatgtttatcagcagtttggcaataatcgtattttctccagtgcagcttataacgccggaccagggcgggtgcgaacctggcttggcaacagcgccgggcgtatcgacgcagtggcatttgtcgagagtattccattctccgagacgcgcggttatgtgaagaacgtgctggcttatgacgcttactaccgctatttcatgggggataaaccgacgttgatgagcgccacggaatggggacgtcgttactgatccgcacgtttatgatatgctatcgtactctttagcgagtacaaccgggggaggcattttgcttcccccgctaacaatggcgacatattatggcccaacaaagtccctatagtgcagcgatggcagaacagcgtcaccaggagtggttacgttttgtcgacctgcttaagaatgcctaccaaaacgatctccatttaccgttgttaaacctgatgctgacgccagatgagcgcgaagcgttggggactcgcgtgcgtattgtcgaagagctgttgcgcggcgaaatgagccagcgtgagttaaaaaatgaactcggcgcaggcatcgcgacgattacgcgtggatctaacagcctgaaagccgcgcccgtcgagctgcgccagtggctggaagaggtgttgctgaaaagcgattgattttgtaggcctgataagacgtggcgcatcaggcatcgtgcaccgaatgccggatgcggcgtgaacgccttatccgtcctacaaatacccgtaatttcaatatgtttggtaggcatgataagacgcggcagcgtcgcatcaggcgcttaatacacggcattatgaaacggactcagcgccaggatcaccgcctggtgatagacgctggcgcgagtgagtttcccggcggtaaacacgccgatcgccccttccttacgaccaatctcatcaataccggtataacggctcatcacgggaccaagcgcctcaccttcacgcactttttccagaatcaccgcaggcaacggcaaagtagcgctacgcgcctcgccgcgctggctggcgttttcaatcaccacccaactgaaagtgctgtcaccatcgatgccagcttcaatcgccacccaaaaatcagcctctggaagtaaacggcgggcattggctacccgatttcgtgcgccagcgcgcgtttcctcactgccaaagggctgttccggtacaccgctctcgacggcaacggatgcaatatggcaggatccttcgccgaagatctcgtgaaatgcctgcagaatggcctgaattttagcgggattggtggtcgcacagacaacttggtgcataatcagcattactcagaaaattaacgttacagcagtatacggaaaaaagcatgttacaggtatacctagtccgccacggtgaaacgcagtggaacgccgagcgacgtattcagggccagtctgacagcccgctgaccgccaaaggtgagcaacaggcgatgcaggtggcaacccgtgccaaagagcttggcattacgcatatcatcagtagcgatttaggacgcacccggcgtacggcggaaatcatcgcccaggcctgcggctgtgacatcatctttgattctcgcctgcgtgaattaaacatgggtgtgctggaaaaaagacatatcgattctctgaccgaagaagaagagaactggcgtcggcagctggtcaatggcaccgttgacgggcgtattcctgaaggcgagagtatgcaggagctcagcgatcgcgtcaatgcggcactggaatcttgccgggacttaccgcagggaagccgaccgctgctggtgagtcatggtattgcactgggatgcctggtgagtacgattctcggattaccagcatgggcagagcgccgcttacgtctgcgtaactgttctattagccgcgtggattatcaggaaagcctgtggctggcgtctggctgggtcgttgaaaccgcaggggacatcagccatctggacgcccctgcattagatgagctgcagcgttaacgacggatcggaatcagcagttcacagcgtagattaattgggcgatctcccgctttggcatcttctgccgggtagtatcgctcaatatcctgacctttacggcgcgtcaggttgagcattggcatgcacgttccgtataccgtcaggataaactcctgcacgccggttcccagaccttcataggtaaacatcacatattcgccgccctgcagcatcaccggatgccccgtcagtacatagccatctgcctgatcctgggctaacgcggtggtatagaatacctcttgctcgtcgtctttatcctgactcggacgcgtttcattcaggccgtagagcaccggcggaatggtcggcgcgttgccgagaaaatcgtgccagaactgataacgcatttcatggcggaaatcagagatttgctccaggctacaggagtagctctgggtaacaccaatcagcggcgtatcttccagggtgacaaatttgtgctctggcatagtgaattcacccaggcgtagcggcgggcgaataccaaaggcgctccattcaggagaacggcggtaaagtgcaggagtctgggcaaactgcttcttgaatgcgcgggtaaatgtctgttgagagtcgaagcggtattgcagcgcgatgtccagaatcggacgcgcagtcaggcgtagtgcgaccgcgcttttgctcaaacgacgagcacgaatatacgcgccaatagcatggccagtgacatctttaaacattctctgtaagtgccacttggaataacctgctttcgccgctacattgtcgaggctcaggggctgatccagatgaccttccagccagattaaaaggtcgcgaataatgccggcctgatccataaaatatcctcatcctttcaacaacgagcacctgacatcaggtaattggataatagcattttttgctgttttagcattcagtgtttttttcttagtagagtatgttttagggcttgacggaaataaaagtattgagattttgttcttaatcaatatgttatttaccgtgacgaactaattgctcgtgtaatagataaaaatggtaacaatatgaaatacaagcatttgatcctgtctttaagcctgataatgctggggccattggctcatgcagaagagattggtagcgtcgacaccgtatttaaaatgatcggcccggatcacaaaattgttgtggaagcctttgatgatcccgatgtgaaaaatgtcacctgttatgtgagccgggcgaaaaccggtggtattaaagggggattgggtctggcggaagatacctccgatgcggccatttcttgtcagcaagtcgggccgattgaactgagcgatcgtattaaaaacggcaaagctcagggcgaggtagtattcaaaaaacgcacgtccctggtctttaagagcttacaggtcgtgcgcttttatgatgccaaacgcaacgcgctcgcttatctggcttactccgacaaagttgtagaaggtagcccgaaaaacgcgattagcgcggttcctgtcatgccgtggcggcaataacagaggcgatttatgcaacgggaaacggtctggttagtggaagatgagcaagggatagccgacacgctggtctacatgttgcagcaggaaggttttgccgtcgaggtctttgagcgaggcttgccggtgctggataaagctcgcaagcaggtacccgacgtcatgattctcgatgttggtctgccggatattagcggctttgaattgtgccgccagttactggcgctccatccggcgttacctgtactgttcctgacggcccgaagtgaagaggtcgatcgcctgcttgggctggaaattggtgctgacgactacgtggctaaaccgtttagtccccgcgaagtgtgcgccagggtgcgcaccttactgcgtcgggtgaagaagttcagcacgccgtctcccgtcatccgtattggacattttgaattgaatgaacccgcggcgcagatcagctggtttgacacgccattagcgctgactcggtatgagtttttattgttgaagacgttactcaagagtccgggccgcgtctggtcccgccagcaactgatggatagcgtatgggaagatgcgcaggacacctacgatcgcaccgtcgatacccacattaaaacgctgcgtgccaagctgcgcgccatcaaccccgatcttagtccgattaatactcatcgcggcatgggatatagcctgaggggcctgtaatgcgtatcggcatgcggttgttgctgggctattttttactggtggcggtggcagcctggttcgtactggccatttttgtcaaagaagttaaaccgggcgtgcgaagagcaacggaggggacgttgatcgacaccgcaacgttgctggcggagctggcgcgtcccgatttgctctctggggacccaacgcatgggcaactggcgcaggcgtttaatcagctacaacatcgcccgtttcgcgccaatatcggtggcattaacaaagtgcgcaatgaatatcatgtctatatgaccgatgcgcagggcaaagtattgttcgatagcgcaaataaagccgttggacaggattatagccgctggaatgacgtctggctaacgttgcgtggtcagtatggtgcgcgcagcacgttgcaaaatcctgccgatcccgaaagttctgtgatgtatgttgccgcaccgattatggacggcagccggcttattggcgttttgagcgtaggcaaaccgaacgcggcgatggctccggtcattaagcgtagcgagcggcgaattttatgggccagcgccattttgttggggattgcactggtgattggcgcaggcatggtttggtggatcaaccgctctattgcccggctcactcgctatgctgattccgtcactgacaataagcccgttcctctccccgatctcggtagtagcgagttgcgtaaactcgcgcaggcgctggaaagtatgcgcgtgaagctggaagggaaaaactatattgagcagtatgtttacgcattaactcatgagctaaaaagcccactggcggcgattcgtggagcggcggaaattttacgcgaaggtccgccgccggaagtggtggctcgttttactgacaacattctgacgcaaaatgcgcgtatgcaggcattggtagaaacgttactacgccaggcaagactggagaatcgtcaggaagtcgttctgactgctgttgatgtggcggcattattccgccgcgtcagcgaagcgcgcaccgtgcagttggcagaaaaaaaaatcactctgcatgttacgcccaccgaggttaacgttgctgctgaaccggcgttactggagcaggcgctgggaaatttactggataacgccatcgattttacccccgagagcggttgcatcacgctaagcgccgaagtggatcaggaacacgtcacgcttaaggtgctggataccggtagtggtattcctgactacgcgcttagtcgtatttttgaacgcttttactctttgcctcgtgcaaatgggcaaaaaagcagcggtctggggttggcgttcgtcagtgaggtcgcccgtttgtttaacggcgaagtcacgctgcgcaacgtgcaggaaggtggcgtgctggccagccttcgacttcaccgtcacttcacataacttcaaattcttcccacatagtcttcgtatcctgctgccattgcaaaggagaagactatgttgaaatcccccctgttctggaaaatgactagcctgtttggtgcagtattgctgttgttgattccgataatgctgattcggcaggtgattgtcgaacgtgctgattaccgtagcgatgtggaagatgcgattcgccaaagtaccagcgggccgcaaaaactcgttgggccgctcatcgctattcctgtgaccgagctttatacggtgcaggaagaggataaaaccgtggagcggaaacgaagttttatccatttttggttacctgagagtttgatggttgatggcaatcagaacgtggaagaacgcaagatagggatttataccggtcaggtctggcacagtgatttaacgttaaaagccgatttcgatgttagccgtcttagcgaactcaacgcgccaaatatcaccttaggcaagccatttattgtgattagcgtcggggatgcgcgtggtattggtgtggtgaaagcgcctgaagttaacggaacggcgctgaccattgaacccggcaccgggttagagcaaggcgggcagggcgtgcatatccctttacctgaaggggactggcggaagcagaacctgaagctgaatatggccctgaatttaagcggtaccggcgatctttctgtggtgcctggcgggcgtaatagcgaaatgaccttaaccagcaactggccgcatcccagttttttaggtgattttctaccagccaaacgggaagttagcgagagtggttttcaggcgcactggcaaagcagctggtttgctaataatctcggtgagcgttttgctagtggcaatgataccggctgggaaaacttcccggcgtttagcgtcgcagtaacgacgccagccgatcaataccaattaactgaccgggcgactaagtacgccattctgctgattgcactgacttttatggcgttctttgtttttgaaacgctcaccgcgcaacgtttacacccaatgcaatatttgctggtggggcttagtttggtgatgttttatttgctcttgctggcgctttctgaacataccggttttaccgtggcatggataatcgccagtctgattggggcgataatgaacggtatttatttgcaagcggtattgaaaggttggtgcaacagcatgttgtttaccctcgcgctgttgttgctggatggtgtgatgtggggactgctcaactctgccgatagcgcgctgttgttgggaaccagtgtgctggtggtggcgctggccggcatgatgtttgtgacccgtaatatcgactggtatgcgtttagtctgccgaaaatgaaagccagtaaagaagttacaacggacgatgagttacgtatctggaaataaggttgaaaaataaaaacggcgctaaaaagcgccgttttttttgacggtggtaaagccgattaatcttccagatcaccgcagaagcgataaccttcaccgtgaatggtggcgatgatttccggcgtatccggcgtagattcgaaatgtttacgaatacggcggatcgtcacgtctacagtacggtcgtgcggtttcagctcacggccggtcattttcttcagcagttcagcacgggactgaattttgcctgggttttcacagaagtgaagcatggcgcggaactcgctgcgcggcagcttgtactgctcgccatcagggccgatcaagctacggctgttgatgtccagttcccaaccattgaacttgtagctttcaacgctacgacgttcttcgctgacagtacccagattcatggtacgggacagtaggttgcgtgcacgaatcgtcagttcacgcgggttgaacggtttggtgatgtagtcatctgcaccgatttcgaggccgagaattttatcgacttcgttgtcacggccagtcaggaacatcaacgcaacattcgcctgctcgcgcagttcacgcgctaacagaagaccgttcttacccggcagattgatatccatgatcaccaggttgatgtcatattcagagaggatctgatgcatttccgcgccatctgtcgcttcgaaaacatcatagccttccgcttcgaaaatacttttcaacgtgttgcgtgttaccaactcgtcttcaacgataagaatgtgcggggtctgcatgtttgctacctaaattgccaactaaatcgaaacaggaagtacaaaagtccctgacctgcctgatgcatgctgcaaattaacatgatcggcgtaacatgactaaagtacgtaattgcgttcttgatgcactttccatcaacgtcaacaacatcattagcttggtcgtgggtactttccctcaggacccgacagtgagtaaaacggctgtcatcctaaccattttaacagcaacataacaggctaagaggggccggacacccaataaaactacgcttcgttgacatatatcaagttcaattgtagcacgttaacagtttgatgaaatcatcgtatctaaatgctagctttcgtcacattattttaataatccaactagttgcatcatacaactaataaacgtggtgaatccaattgtcgagatttattttttataaaattatcctaagtaaacagaaggatatgtagcattttttaacaactcaaccgttagtacagtcaggaaatagtttagccttttttaagctaagtaaagggctttttctgcgacttacgttaagaatttgtaaattcgcaccgcgtaataagttgacagtgatcacccggttcgcggttatttgatcaagaagagtggcaatatgcgtataacgattattctggtcgcacccgccagagcagaaaatattggggcagcggcgcgggcaatgaaaacgatggggtttagcgatctgcggattgtcgatagtcaggcacacctggagccagccacccgctgggtcgcacatggatctggtgatattattgataatattaaagttttcccgacattggctgaaagcttacacgatgtcgatttcactgtcgccaccactgcgcgcagtcgggcgaaatatcattactacgccacgccagttgaactggtgccgctgttagaggaaaaatctagttggatgagccatgccgcgctggtgtttggtcgcgaagattccgggttgactaacgaagagttagcgttggctgacgttcttactggtgtgccgatggtggcggattatcctagcctcaatctggggcaggcggtgatggtctattgctatcaattagcaacattaatacaacaaccggcgaaaagtgatgcaacggcagaccaacatcaactgcaagctttacgcgaacgagccatgacattgctgacgactctggcagtggcagatgacataaaactggtcgactggttacaacaacgcctggggcttttagagcaacgagacacggcaatgttgcaccgtttgctgcatgatattgaaaaaaatatcaccaaataaaaaacgccttagtaagtatttttc
